(19) United States
(12) Patent Application Publication
(10) Pub. No.: US 2004/0121953 A1
(43) Pub. Date: Jun. 24, 2004

(54) Thrombopoiesis-stimulating proteins having reduced immunogenicity

(76) Inventors: Arthur J. Chirino, Camarillo, CA (US); Jamal El Yazal, Alta Loma, CA (US); Shannon Alicia Marshall, San Francisco, CA (US); Peter McDonnell, Thousand Oaks, CA (US); Jost Vielmetter, Altadena, CA (US)

Correspondence Address: Robin M. Silva, DORSEY & WHITNEY LLP, Suite 3400, Four Embarcadero Center, San Francisco, CA, 94111-4187, US

(21) Appl. No.: 10/638,995

(22) Filed: Aug. 11, 2003

Related U.S. Application Data
(60) Provisional application No. 60/467,609, filed on May 2, 2003.
(60) Provisional application No. 60/416,305, filed on Oct. 3, 2002.
(60) Provisional application No. 60/402,344, filed on Aug. 9, 2002.

(51) Int. Cl. C07K 14/575

(52) U.S. Cl. 514/12; 530/399

(57) ABSTRACT

The present invention relates to variant thrombopoietin proteins that possess thrombopoiesis-stimulating activity and have reduced immunogenicity. In particular, variants of thrombopoietin with reduced ability to bind one or more human class II MHC molecules are described.

[0001] This application is a continuation-in-part of U.S. Ser. No. 60/416,305, filed Oct. 3, 2002; U.S. Ser. No. 60/402,344, filed Aug. 9, 2002 and U.S. Ser. No. 60/467,609, filed May 2, 2003.

### FIELD OF THE INVENTION

[0002] The present invention relates to variant thrombopoietin proteins that possess thrombopoiesis-stimulating activity and have reduced immunogenicity. In particular, variants of thrombopoietin with reduced ability to bind one or more human class II MHC molecules are described.

### SEQUENCE LISTING

[0003] The Sequence Listing submitted on compact disc is hereby incorporated by reference. The two identical compact discs were created on Aug. 11, 2003 and contain the file named A71703-1.ST25.txt, created on Aug. 9, 2003, and containing 692,224 bytes.

### BACKGROUND OF THE INVENTION

[0004] Immunogenicity is a major barrier to the development and utilization of protein therapeutics. Although immune responses are typically most severe for non-human proteins, even therapeutics based on human proteins may be immunogenic. Immunogenicity is a complex series of responses to a substance that is perceived as foreign and can include production of neutralizing and non-neutralizing antibodies, formation of immune complexes, complement activation, mast cell activation, inflammation, and anaphylaxis.

[0005] Several factors can contribute to protein immunogenicity, including but not limited to the protein sequence, the route and frequency of administration, and the patient population.

[0006] Immunogenicity may limit the efficacy and safety of a protein therapeutic in multiple ways. Efficacy can be reduced directly by the formation of neutralizing antibodies. Efficacy can also be reduced indirectly, as binding to either neutralizing or non-neutralizing antibodies typically leads to rapid clearance from serum. Severe side effects and even death can occur when an immune reaction is raised. One special class of side effects results when neutralizing antibodies cross-react with an endogenous protein and block its function.

[0007] Thrombopoietin (TPO), also called mpl ligand or megakaryocyte growth and differentiation factor (MGDF), is a protein that acts to promote the growth and differentiation of platelets and other hematopoietic lineages (see for example Bartley et. al., Cell 77: 1117-1124 (1994), de Sauvage et. al. Nature 369: 533-538 (1994), Foster et. al. PNAS 91: 13023-13027(1994)). Therapeutic use of TPO could be beneficial in a wide range of conditions that result in inadequate platelet counts (e.g., thrombocytopenia) (See, for example, U.S. Pat. Nos. 5,989,537; 6,099,830; 5,766,581; 5,795,569; 5,326,558; and 5,593,666).

[0008] However, harmful immune reactions have occurred when patients have been treated with TPO. For example, clinical trials were terminated when healthy volunteers raised anti-TPO antibodies that cross-reacted with and neutralized endogenous TPO. Since these patients effectively lacked functioning TPO, they could not produce sufficient platelets and thus became thrombocytopenic (see for example Li et. al. Blood 96: 3241-3248 (2001)).

[0009] Several methods have been developed to modulate the immunogenicity of proteins. In some cases, PEGylation has been observed to reduce the fraction of patients who raise neutralizing antibodies by sterically blocking access to antibody epitopes (see for example, Hershfield et. al. PNAS 1991 88:7185-7189 (1991); Bailon. et al. Bioconjug. Chem. 12: 195-202(2001); He et a. Life Sci. 65: 355-368 (1999)). Methods that improve the solution properties of a protein therapeutic may also reduce immunogenicity, as aggregates have been observed to be more immunogenic than soluble proteins.

[0010] A more general approach to immunogenicity reduction involves mutagenesis targeted at the epitopes in the protein sequence and structure that are most responsible for stimulating the immune system. Some success has been achieved by randomly replacing surface-exposed residues to lower binding affinity to panels of known neutralizing antibodies (See, for example, U.S. Pat. No. 5,766,898). However, due to the incredible diversity of the antibody repertoire, mutations that lower affinity to known antibodies will most likely lead to production of an another set of antibodies rather than abrogation of immunogenicity.

[0011] An alternate approach is to disrupt T-cell activation. Removal of MHC-binding epitopes offers a much more tractable approach to immunogenicity reduction, as the diversity of MHC molecules comprises only ˜10³ alleles, while the antibody repertoire is estimated to be approximately 10⁸ and the T-cell receptor repertoire is larger still. By identifying and removing or modifying class II MHC-binding peptides within a protein sequence, the molecular basis of immunogenicity can be evaded. The elimination of such epitopes for the purpose of generating less immunogenic proteins has been disclosed previously. See, for example, WO 98/52976, WO 02/079232, and WO 00/3317.

[0012] Methods for identifying and modifying MHC-binding epitopes in human TPO have been disclosed previously (See, for example, WO00/234,779 and WO02/068469). However, due to the large number of variants disclosed, and the lack of consideration of the structural and functional effects of the introduced mutations, one skilled in the art faces a problem in identifying a variant that would be a functional, non-immunogenic TPO variant suitable for administration to patients.

[0013] While mutations in MHC-binding epitopes can be identified that are predicted to confer reduced immunogenicity, most amino acid substitutions are energetically unfavorable. As a result, the vast majority of the reduced immunogenicity sequences identified using the methods described above will be incompatible with the structure and/or function of the protein. In order for MHC epitope removal to be a viable approach for reducing immunogenicity, it is crucial that simultaneous efforts are made to maintain a protein's structure, stability, and biological activity. Accordingly, there is a need to identify less immunogenic variants of TPO that significantly retain its desired thrombopoiesis-stimulating activity.

### SUMMARY OF THE INVENTION

[0014] The present invention relates to variants of TPO that substantially retain thrombopoiesis-stimulating activity and reduce or substantially eliminate immunogenicity relative to native TPO.

[0015] An aspect of the present invention are TPO variants that comprise peptides with decreased binding affinity for one or more class II MHC alleles relative to native human TPO and which significantly maintain the thrombopoiesis-stimulating activity of native human TPO.

[0016] In a further aspect, the invention provides recombinant nucleic acids encoding the variant TPO proteins as well as expression vectors and host cells encoding and producing variant TPO proteins.

[0017] An aspect of the present invention are TPO variants that show decreased binding affinity for one or more class II MHC alleles relative to native human TPO and which significantly maintain the thrombopoiesis-stimulating activity of native human TPO.

[0018] In a further aspect, the invention provides recombinant nucleic acids encoding the variant TPO proteins, expression vectors, and host cells.

[0019] In an additional aspect, the invention provides methods of producing a variant TPO protein comprising culturing the host cells of the invention under conditions suitable for expression of the variant TPO protein.

[0020] In a further aspect, the invention provides pharmaceutical compositions comprising a variant TPO protein of the invention and a pharmaceutical carrier.

[0021] In a further aspect, the invention provides methods for preventing or treating disorders related to insufficient platelet counts comprising administering a variant TPO protein of the invention to a patient.

[0022] In accordance with the objects outlined above, the present invention provides TPO variant proteins comprising amino acid sequences with at least one amino acid change compared to the wild type TPO proteins.

### BRIEF DESCRIPTION OF THE FIGURES

[0023] FIG. 1a shows the amino acid sequence of the N-terminal cytokine domain of human TPO (SEQ ID NO:1).

[0024] FIG. 1b shows the full-length amino acid sequence of human TPO (SEQ ID NO:2). GenBank gi|730982|sp|P402251|TPO_HUMAN Thrombopoietin precursor (Megakaryocyte colony stimulating factor) (Myeloproliferative leukemia virus oncogene ligand) (C-mpl ligand) (ML) (Megakaryocyte growth and development factor) (MGDF).

[0025] FIG. 2 shows one possible sequence alignment of human erythropoietin (EPO) (SEQ ID NO:3) and the N-terminal cytokine domain of TPO (SEQ ID NO:1).

[0026] FIG. 3 shows the number of DR alleles that are hit at 1%, 3%, and 5% thresholds by each 9-mer in wild type TPO.

[0027] FIG. 4 shows the results of Library 1 and epitope 1 BaF3 cell proliferation in the presence of various thrombopoietin variants. Wild type thrombopoietin (wt tpo) contains amino acid 1 to 157. Variants were derived from wt tpo, expressed in 293T cells, and the culture supernatant used to test activity. Commercial thrombopoietin was produced in E. coli and has 174 amino acid residues.

### DETAILED DESCRIPTION OF THE INVENTION

[0028] Definitions:

[0029] By “9-mer peptide frame” and grammatical equivalents herein is meant a linear sequence of nine amino acids that is located in a protein of interest. 9-mer frames may be analyzed for their propensity to bind one or more Class II MHC alleles.

[0030] By “allele” and grammatical equivalents herein is meant an alternative form of a gene. Specifically, in the context of Class II MHC molecules, alleles comprise all naturally occurring sequence variants of DRA, DRB1, DRB3/4/5, DQA1, DQB1, DPA1, and DPB1 molecules.

[0031] By “control sequences” and grammatical equivalents herein is meant nucleic acid sequences necessary for the expression of an operably linked coding sequence in a particular host organism. The control sequences that are suitable for prokaryotes, for example, include a promoter, optionally an operator sequence, and a ribosome binding site. Eukaryotic cells are known to utilize promoters, polyadenylation signals, and enhancers.

[0032] By “hit” and grammatical equivalents herein is meant, in the context of the matrix method, that a given peptide is predicted to bind to a given Class II MHC allele. In a preferred embodiment, a hit is defined to be a peptide with binding affinity among the top 5%, or 3%, or 1% of binding scores of random peptide sequences. In an alternate embodiment, a hit is defined to be a peptide with a binding affinity that exceeds some threshold, for instance a peptide that is predicted to bind an MHC allele with at least 100 μM or 10 μM or 1 μM affinity.

[0033] By “immunog nicity” and grammatical equivalents herein is meant the ability of a protein to elicit an immune response, including but not limited to production of neutralizing and non-neutralizing antibodies, formation of immune complexes, complement activation, mast cell activation, inflammation, and anaphylaxis.

[0034] By “matrix method” and grammatical equivalents thereof herein is meant a method for calculating peptide-MHC affinity in which a matrix is used that contains a score for each possible residue at each position in the peptide that interacts with a given MHC allele. The binding score for a given peptide is obtained by summing the matrix values for the amino acids observed at each position in the peptide.

[0035] By “MHC-binding epitopes” and grammatical equivalents herein is meant peptides that are capable of binding to one or more Class II MHC alleles with appropriate affinity to enable the formation of a MHC-peptide-T-cell receptor complex and subsequent T-cell activation. MHC-binding epitopes are linear peptides that comprise at least approximately 9 residues.

[0036] By “naturally occurring” or “wild-type” and grammatical equivalents thereof herein is meant an amino acid sequence or a nucleotide sequence that is found in nature and includes allelic variations. In a preferred embodiment, the wild-type sequence is the most prevalent human sequence. However, the wild type TPO proteins may be from any number of organisms, include, but are not limited to, rodents (rats, mice, hamsters, guinea pigs, etc.), primates, and farm animals (including sheep, goats, pigs, cows, horses, etc). As will be appreciated by those in the art, TPO proteins from mammals other than humans may find use in animal models of human disease.

[0037] By “nucleic acid” and grammatical equivalents herein is meant DNA, RNA, or molecules which contain both deoxy- and ribonucleotides. Nucleic acids include genomic DNA, cDNA and oligonucleotides including sense and anti-sense nucleic acids. Nucleic acids may also contain modifications, such as modifications in the ribose-phosphate backbone that confer increased stability and half-life. Nucleic acid is “operably linked” when it is placed into a functional relationship with another nucleic acid sequence. For example, DNA for a presequence or secretory leader is operably linked to DNA for a polypeptide if it is expressed as a preprotein that participates in the secretion of the polypeptide; a promoter or enhancer is operably linked to a coding sequence if it affects the transcription of the sequence; or a ribosome binding site is operably linked to a coding sequence if it is positioned so as to facilitate translation. Generally, “operably linked” means that the DNA sequences being linked are contiguous, and, in the case of a secretory leader, contiguous and in reading frame. However, elements such as enhancers do not have to be contiguous.

[0038] A “patient” for the purposes of the present invention includes both humans and other animals, particularly mammals, and organisms. Thus the methods are applicable to both human therapy and veterinary applications. In the preferred embodiment the patient is a mammal, and in the most preferred embodiment the patient is human.

[0039] “Pharmaceutically acceptable acid addition salt” refers to those salts that retain the biological effectiveness of the free bases and that are not biologically or otherwise undesirable, formed with inorganic acids such as hydrochloric acid, hydrobromic acid, sulfuric acid, nitric acid, phosphoric acid and the like, and organic acids such as acetic acid, propionic acid, glycolic acid, pyruvic acid, oxalic acid, maleic acid, malonic acid, succinic acid, fumaric acid, tartaric acid, citric acid, benzoic acid, cinnamic acid, mandelic acid, methanesulfonic acid, ethanesulfonic acid, p-toluenesulfonic acid, salicylic acid and the like.

[0040] “Pharmaceutically acceptable base addition salts” include those derived from inorganic bases such as sodium, potassium, lithium, ammonium, calcium, magnesium, iron, zinc, copper, manganese, aluminum salts and the like. Particularly preferred are the ammonium, potassium, sodium, calcium, and magnesium salts. Salts derived from pharmaceutically acceptable organic non-toxic bases include salts of primary, secondary, and tertiary amines, substituted amines including naturally occurring substituted amines, cyclic amines and basic ion exchange resins, such as isopropylamine, trimethylamine, diethylamine, triethylamine, tripropylamine, and ethanolamine.

[0041] By “protein” herein is meant a molecule comprising at least two covalently attached amino acids, which includes proteins, polypeptides, oligopeptides and peptides. The protein may be made up of naturally occurring amino acids and peptide bonds, or synthetic peptidomimetic structures, i.e., “analogs” such as peptoids [see Simon et al., Proc. Natl. Acad. Sci. U.S.A. 89(20:9367-71 (1992)] or non-canonical amino acids such as homo-phenylalanine, citrulline, hydroxyproline, and noreleucine. Both D- and L-amino acids may be utilized.

[0042] By “reduced immunogenicity” and grammatical equivalents herein is meant a decreased ability to activate the immune system, when compared to the wild type protein. For example, a TPO variant protein can be said to have “reduced immunogenicity” if it elicits neutralizing or non-neutralizing antibodies in lower titer or in fewer patients than wild type TPO. In a preferred embodiment, the probability of raising neutralizing antibodies is decreased by at least 5%, with at least 50% or 90% decreases being especially preferred. So, if a wild type produces an immune response in 10% of patients, a variant with reduced immunogenicity would produce an immune response in not more than 9.5% of patients, with less than 5% or less than 1% being especially preferred. A TPO variant protein also can be said to have “reduced immunogenicity” if it shows decreased binding to one or more MHC alleles or if it induces T-cell activation in a decreased fraction of patients relative to wild type TPO. In a preferred embodiment, the probability of T-cell activation is decreased by at least 5%, with at least 50% or 90% decreases being especially preferred.

[0043] By “therapeutically effective dose” herein is meant a dose that produces the effects for which it is administered. The exact dose will depend on the purpose of the treatment, and will be ascertainable by one skilled in the art using known techniques. In a preferred embodiment, dosages of about 5 μg/kg are used, administered either intravenously or subcutaneously. As is known in the art, adjustments for variant TPO protein degradation, systemic versus localized delivery, and rate of new protease synthesis, as well as the age, body weight, general health, sex, diet, time of administration, drug interaction and the severity of the condition may be necessary, and will be ascertainable with routine experimentation by those skilled in the art.

[0044] “TPO-responsive disorders” and grammatical equivalents herein is meant diseases, disorders, and conditions that can benefit from treatment with TPO. Examples of TPO-responsive disorders include, but are not limited to, myelodysplastic syndromes, liver disease, amylotrophic lateral sclerosis, and immune thrombocytopenia purpura. TPO may also be beneficial for patients receiving treatments, such as for cancer, HIV, hepatitis C, and other diseases, that can result in low levels of platelets and other types of blood cells. TPO may also be beneficial for patients undergoing surgery or bone marrow transplantation. TPO may also be used to increase platelet concentrations in platelet donors.

[0045] By “treatment” herein is meant to include therapeutic treatment, as well as prophylactic, or suppressive measures for the disease or disorder. Thus, for example, successful administration of a variant TPO protein prior to onset of the disease may result in treatment of the disease. As another example, successful administration of a variant TPO protein after clinical manifestation of the disease to combat the symptoms of the disease comprises “treatment” of the disease. “Treatment” also encompasses administration of a variant TPO protein after the appearance of the disease in order to eradicate the disease. Successful administration of an agent after onset and after clinical symptoms have developed, with possible abatement of clinical symptoms and perhaps amelioration of the disease, further comprises “treatment” of the disease.

[0046] By “variant TPO nucleic acids” and grammatical equivalents herein is meant nucleic acids that encode variant TPO proteins. Due to the degeneracy of the genetic code, an extremely large number of nucleic acids may be made, all of which encode the variant TPO proteins of the present invention, by simply modifying the sequence of one or more codons in a way, which does not change the amino acid sequence of the variant TPO.

[0047] By “variant TPO proteins” or “non-naturally occurring TPO proteins” and grammatical equivalents thereof herein is meant non-naturally occurring TPO proteins which differ from the wild type TPO protein by at least one (1) amino acid insertion, deletion, or substitution. It should be noted that unless otherwise stated, all positional numbering of variant TPO proteins and variant TPO nucleic acids is based on these sequences. TPO variants are characterized by the predetermined nature of the variation, a feature that sets them apart from naturally occurring allelic or interspecies variation of the TPO protein sequence. The TPO variants typically either exhibit the same qualitative biological activity as the naturally occurring TPO or have been specifically engineered to have alternate biological properties. Variant TPO proteins comprise the N-terminal cytokine domain and may optionally include part or all of the C-terminal domain. In a preferred embodiment, the variant TPO comprises residues 1-153, 1-159, or 1-163 as shown in FIG. 1. The variant TPO proteins may contain insertions, deletions, and/or substitutions at the N-terminus, C-terminus, or internally. In a preferred embodiment, variant TPO proteins have at least 1 residue that differs from the human TPO sequence, with at least 2, 3, 4, or 5 different residues being more preferred. Variant TPO proteins may contain further modifications, for instance mutations that alter stability or solubility or which enable or prevent posttranslational modifications such as PEGylation or glycosylation. Variant TPO proteins may be subjected to co- or post-translational modifications, including but not limited to synthetic derivatization of one or more side chains or termini, glycosylation, PEGylation, circular permutation, cyclization, fusion to proteins or protein domains, and addition of peptide tags or labels.

[0048] Identification of MHC-Binding Epitopes in TPO

[0049] MHC-binding peptides are obtained from proteins such as TPO by a process called antigen processing. First, the protein is transported into an antigen presenting cell by endocytosis or phagocytosis. A variety of proteolytic enzymes then cleave the protein into a number of peptides. Next, these peptides can then be loaded onto Class II MHC molecules, and the resulting peptide-MHC complexes are transported to the cell surface. Relatively stable peptide-MHC complexes can be recognized by T-cell receptors that are present on the surface of naive T-cells. This recognition event is required for the initiation of an immune response. Accordingly, blocking the formation of stable peptide-MHC complexes is an effective approach for preventing unwanted immune responses.

[0050] The factors that determine the affinity of peptide-MHC interactions have been characterized using biochemical and structural methods. Peptides bind in an extended conformation bind along a groove in the Class II MHC molecule. While peptides that bind Class II MHC molecules are typically approximately 13-18 residues long, a nine-residue region is responsible for most of the binding affinity and specificity. The peptide binding groove can be subdivided into “pockets”, commonly named P1 through P9, where each pocket is comprises the set of MHC residues that interacts with a specific residue in the peptide. A number of polymorphic residues face into the peptide-binding groove of the MHC molecule. The identity of the residues lining each of the peptide-binding pockets of each MHC molecule determines its peptide binding specificity. Conversely, the sequence of a peptide determines its affinity for each MHC allele.

[0051] Several methods of identifying MHC-binding epitopes in protein sequences are known in the art and may be used to identify epitopes in TPO.

[0052] Sequence-based information can be used to determine a binding score for a given peptide-MHC interaction (see for example Brusic et. al. Bioinformatics 14: 121-130 (1998) Reche et. al. Hum. Immunol. 63: 701-709 (2002); Mallios, Bioinformatics 15: 432-439 (1999); Mallios, Bioinformatics 17: p942-948 (2001); Sturniolo et. al. Nature Biotech. 17: 555-561(1999)). It is possible to use structure-based methods in which a given peptide is computationally placed in the peptide-binding groove of a given MHC molecule and the interaction energy is determined (See, for example, Altuvia et. al. J. Mol. Biol. 249:244-250 (1995), WO98/59244 and WO02/069232). Such methods may be referred to as “threading” methods. Alternatively, purely experimental methods can be used; for example a set of overlapping peptides derived from the protein of interest can be experimentally tested for the ability to induce T-cell activation and/or other aspects of an immune response. (See, for example, WO 02/77187).

[0053] In a preferred embodiment, MHC-binding propensity scores are calculated for each 9-residue frame along the human TPO sequence using a matrix method (see Sturniolo et. al., supra; Marshall et. al., J. Immunol. 154: 5927-5933 (1995), and Hammer et. al., J. Exp. Med. 180: 2353-2358 (1994)). The matrix comprises binding scores for specific amino acids interacting with the peptide binding pockets in different human Class II MHC molecule. In the most preferred embodiment, the scores in the matrix are obtained from experimental peptide binding studies. In an alternate preferred embodiment, scores for a given amino acid binding to a given pocket are extrapolated from experimentally characterized alleles to additional alleles with identical or similar residues lining that pocket. Matrices that are produced by extrapolation are referred to as “virtual matrices”.

[0054] In a preferred embodiment, the matrix method is used to calculate scores for each peptide of interest binding to each allele of interest. Several methods can then be used to determine whether a given peptide will bind with significant affinity to a given MHC allele. In one embodiment, the binding score for the peptide of interest is compared with the binding propensity scores of a large set of reference peptides. Peptides whose binding propensity scores are large compared to the reference peptides are likely to bind MHC and may be classified as “hits”. For example, if the binding propensity score is among the highest 1% of possible binding scores for that allele, it may be scored as a “hit” at the 1% threshold. The total number of hits at one or more threshold values is calculated for each peptide. In some cases, the binding score may directly correspond with a predicted binding affinity. Then, a hit may be defined as a peptide predicted to bind with at least 100 mM or 10 mM or 1 mM affinity.

[0055] In a preferred embodiment, the number of hits for each 9-mer frame in the protein is calculated using one or more threshold values ranging from 0.5% to 10%. In an especially preferred embodiment, the number of hits is calculated using 1%, 3%, and 5% thresholds.

[0056] In a preferred embodiment, MHC-binding epitopes are identified as the 9-mer frames that bind to several Class II MHC alleles. In an especially preferred embodiment, MHC-binding epitopes are predicted to bind at least 10 alleles at 5% threshold and/or at least 5 alleles at 1% threshold. Such 9-mer frames may be especially likely to elicit an immune response in many members of the human population.

[0057] In an alternate preferred embodiment, MHC-binding epitopes are predicted to bind MHC alleles that are present in at least 0.01-10% of the human population.

[0058] In an additional preferred embodiment, MHC-binding epitopes are identified as the 9-mer frames that are located among “nested” epitopes, or overlapping 9-residue frames that are each predicted to bind a significant number of alleles. Such sequences may be especially likely to elicit an immune response.

[0059] Preferred MHC-binding epitopes in TPO include, but are not limited to, residues 9-17,11-19,15-23, 16-24, 69-77, 97-105, 135-143, 139-147, 144-152, 152-160, 296-304, and 297-305.

[0060] Especially preferred MHC-binding epitopes in native TPO include, but are not limited to, residues 9-17 and 135-143. These epitopes are both predicted to bind to a large number of MHC alleles. Furthermore, these epitopes are located within regions of nested epitopes; for example, residues 9-17 overlap with the immunogenic epitopes at residues 11-19, 15-23, and 16-24.

[0061] Confirmation of MHC-Binding Epitopes

[0062] In a preferred embodiment, the immunogenicity of the above-predicted MHC-binding epitopes is experimentally confirmed by measuring the extent to which peptides comprising each predicted epitope can elicit an immune response. However, it is possible to proceed from epitope prediction to epitope removal without the intermediate step of epitope confirmation.

[0063] Several methods, discussed in more detail below, can be used for experimental confirmation of epitopes. For example, sets of naive T-cells and antigen presenting cells from matched donors can be stimulated with a peptide or protein containing an epitope of interest, and T-cell activation can be monitored. In a preferred embodiment, interferon gamma production by activated T-cells is monitored, although it is also possible to use other indicators of T-cell activation or proliferation such as tritiated thymidine incorporation or interleukin 5 production.

[0064] Design of Active, Less-Immunogenic Variants

[0065] In a preferred embodiment, the above-determined MHC-binding epitopes are replaced with alternate amino acid sequences to generate active variant TPO proteins with reduced or eliminated immunogenicity. Alternatively, the MHC-binding epitopes are modified to introduce one or more sites that are susceptible to cleavage during protein processing. If the epitope is cleaved before it binds to a MHC molecule, it will be unable to promote an immune response. There are several possible strategies for integrating methods for identifying less immunogenic sequences with methods for identifying structured and active sequences, including but not limited to those presented below.

[0066] Protein design methods and MHC epitope identification methods can be used together to identify stable, active, and minimally immunogenic protein sequences (see WO03/006154). The combination of approaches provides significant advantages over the prior art for immunogenicity reduction, as most of the reduced immunogenicity sequences identified using other techniques fail to retain sufficient activity and stability to serve as therapeutics.

[0067] A wide variety of methods are known for generating and evaluating sequences. These include, but are not limited to, sequence profiling (Bowie and Eisenberg, Science 253(5016): 164-70, (1991)), rotamer library selections (Dahiyat and Mayo, Protein Sci 5(5): 895-903 (1996); Dahiyat and Mayo, Science 278(5335): 82-7 (1997); Desjarlais and Handel, Protein Science 4: 2006-2018 (1995); Harbury et al, PNAS USA 92(18): 8408-8412 (1995); Kono et al., Proteins: Structure, Function and Genetics 19: 244-255 (1994); Hellinga and Richards, PNAS USA 91: 5803-5807 (1994)); and residue pair potentials (Jones, Protein Science 3: 567-574, (1994)).

[0068] In a preferred embodiment, rational design of novel TPO variants is achieved by using Protein Design Automation® (PDA®) technology. (See U.S. Pat. Nos. 6,188,965; 6,269,312; 6,403,312; WO98/47089 and U.S. Ser Nos. 09/058,459, 09/127,926, 60/104,612, 60/158,700, 09/419,351, 60/181,630, 60/186,904, 09/419,351, 09/782,004 and 09/927,790, 60/347,772, and 10/218,102; and PCT/US01/218,102 and U.S. Ser. No. 10/218,102, U.S. Ser. No. 60/345,805; U.S. Ser. No. 60/373,453 and U.S. Ser. No. 60/374,035, all references expressly incorporated herein in their entirety.)

[0069] PDA® technology couples computational design algorithms that generate quality sequence diversity with experimental high-throughput screening to discover proteins with improved properties. The computational component uses atomic level scoring functions, side chain rotamer sampling, and advanced optimization methods to accurately capture the relationships between protein sequence, structure, and function. Calculations begin with the three-dimensional structure of the protein and a strategy to optimize one or more properties of the protein. PDA® technology then explores the sequence space comprising all pertinent amino acids (including unnatural amino acids, if desired) at the positions targeted for design. This is accomplished by sampling conformational states of allowed amino acids and scoring them using a parameterized and experimentally validated function that describes the physical and chemical forces governing protein structure. Powerful combinatorial search algorithms are then used to search through the initial sequence space, which may constitute 10⁵⁰ sequences or more, and quickly return a tractable number of sequences that are predicted to satisfy the design criteria. Useful modes of the technology span from combinatorial sequence design to prioritized selection of optimal single site substitutions. PDA® technology has been applied to numerous systems including important pharmaceutical and industrial proteins and has a demonstrated record of success in protein optimization

[0070] PDA® utilizes three-dimensional structural information. In the most preferred embodiment, the structure of TPO is obtained by solving its crystal structure or NMR structure by techniques well known in the art. In an alternate preferred embodiment, a homology model of TPO is built, using methods known to those in the art. For example, a homology model of TPO can be made using the structure of erythropoietin (EPO) and/or other homologous four helix bundle cytokines and the sequence of human TPO. Homology models of TPO have been generated previously; see Song et. al., J. Comp. Aid. Molec. Design, 12: 419-424 (1998).

[0071] In a preferred embodiment, the results of matrix method calculations are used to identify which of the 9 amino acid positions within the epitope(s) contribute most to the overall binding propensities for each particular allele “hit”. This analysis considers which positions (P1-P9) are occupied by amino acids which consistently make a significant contribution to MHC binding affinity for the alleles scoring above the threshold values. Matrix method calculations are then used to identify amino acid substitutions at said positions that would decrease or eliminate predicted immunogenicity and PDA® technology is used to determine which of the alternate sequences with reduced or eliminated immunogenicity are compatible with maintaining the structure and function of the protein.

[0072] In an alternate preferred embodiment, the residues in each epitope are first analyzed by one skilled in the art to identify alternate residues that are potentially compatible with maintaining the structure and function of the protein. Then, the set of resulting sequences are computationally screened to identify the least immunogenic variants. Finally, each of the less immunogenic sequences are analyzed more thoroughly in PDA® technology protein design calculations to identify protein sequences that maintain the protein structure and function and decrease immunogenicity.

[0073] For example, mutagenesis studies conducted on TPO have implicated the following residues in receptor binding: D8, R10, P42, F46, E50, W51, F129, R136, G137, K138, and R140; R10 and K138 appear to be especially important (see Pearce et. al. J. Biol. Chem. 272:20695-20602 (1997), Hoffman et. al. Biochemistry 35:14849-14861 (1996), Hou and Zhan Cytokine 10:319-330 (1998), Park et. al. J. Biol. Chem. 273:256-261 (1998), and Jaggerschmidt et. al. Biochem. J. 333: 729-734 (1998)). In addition, the following residues in TPO participate in disulfide bonds that are likely important in maintaining structural integrity: C7, C29, C85, and C151. Accordingly, in a preferred embodiment, these residues are not modified in the TPO variants. In an alternate preferred embodiment, only very conservative mutations are considered at these positions. Examples of conservative mutations include, but are not limited to, R10K and K138R.

[0074] In an alternate preferred embodiment, each residue that contributes significantly to the MHC binding affinity of an epitope is analyzed to identify a subset of amino acid substitutions that are potentially compatible with maintaining the structure and function of the protein. This step may be performed in several ways, including PDA® calculations or visual inspection by one skilled in the art. Sequences may be generated that contain all possible combinations of amino acids that were selected for consideration at each position. Matrix method calculations can be used to determine the immunogenicity of each sequence. The results can be analyzed to identify sequences that have significantly decreased immunogenicity. Additional PDA® calculations may be performed to determine which of the minimally immunogenic sequences are compatible with maintaining the structure and function of the protein.

[0075] In an alternate preferred embodiment, energy or pseudo-energy terms describing peptide binding propensity are incorporated directly into the PDA® technology calculations. In this way, it is possible to select sequences that are active and less immunogenic in a single computational step.

[0076] In a preferred embodiment, PDA® technology and matrix method calculations are used to remove more than one MHC-binding epitope from a protein of interest.

[0077] Additional Modifications

[0078] Additional insertions, deletions, and substitutions may be incorporated into the variant TPO proteins of the invention in order to confer other desired properties.

[0079] In one embodiment, additional modifications are introduced to alter properties such as stability, solubility, and receptor binding affinity. Such modifications can also contribute to immunogenicity reduction. For example, since protein aggregates have been observed to be more immunogenic than soluble proteins, modifications that improve solubility may reduce immunogenicity (see for example Braun et. al. Pharm. Res. 14: 1472 (1997) and Speidel et. al. Eur. J. Immunol. 27: 2391 (1997)).

[0080] In one embodiment, the sequence of the variant TPO protein is modified in order to add or remove one or more N-linked or O-linked glycosylation sites. Addition of glycosylation sites to variant TPO polypeptides may be accomplished by the incorporation of one or more serine or threonine residues to the native sequence or variant TPO polypeptide (for O-linked glycosylation sites) or by the incorporation of a canonical N-linked glycosylation site, including but not limited to, N-X-Y, where X is any amino acid except for proline and Y is preferably threonine, serine or cysteine. Glycosylation sites may be removed by replacing one or more serine or threonine residues or by replacing one or more canonical N-linked glycosylation sites.

[0081] In another preferred embodiment, cysteines or other reactive amino acids are designed into variant TPO proteins in order to incorporate labeling sites or PEGylation sites.

[0082] In another preferred embodiment, the N- and C-termini of a variant TPO protein are joined to create a cyclized or circularly permutated TPO protein. Various techniques may be used to permutate proteins. See U.S. Pat. No. 5,981,200; Maki K, Iwakura M., Seikagaku. 2001 January; 73(1): 42-6; Pan T., Methods Enzymol. 2000; 317:313-30; Heinemann U, Hahn M., Prog Biophys Mol. Biol. 1995; 64(2-3): 121-43; Harris ME, Pace NR, Mol Biol Rep. 1995-96; 22(2-3): 115-23; Pan T, Uhlenbeck OC., 1993 Mar. 30; 125(2): 111-4; Nardulli AM, Shapiro DJ. 1993 Winter; 3(4): 247-55, EP 1098257 A2; WO 02/22149; WO 01/51629; WO 99/51632; Hennecke, et al., 1999, J. Mol. Biol., 286, 1197-1215; Goldenberg et al J. Mol. Biol 165, 407-413 (1983); Luger et al, Science, 243, 206-210 (1989); and Zhang et al., Protein Sci 5,1290-1300 (1996); all hereby incorporated by reference.

[0083] To produce a circularly permuted TPO protein, a novel set of N- and C-termini are created at amino acid positions normally internal to the protein's primary structure, and the original N- and C-termini are joined via a peptide linker consisting of from 0 to 30 amino acids in length (in some cases, some of the amino acids located near the original termini are removed to accommodate the linker design). In a preferred embodiment, the novel N- and C-termini are located in a non-regular secondary structural element, such as a loop or turn, such that the stability and activity of the novel protein are similar to those of the original protein. The circularly permuted TPO protein may be further PEGylated or glycosylated. In a further preferred embodiment PDA® technology may be used to further optimize the TPO variant, particularly in the regions created by circular permutation. These include the novel N- and C-termini, as well as the original termini and linker peptide.

[0084] In addition, a completely cyclic TPO may be generated, wherein the protein contains no termini. This is accomplished utilizing intein technology. Thus, peptides can be cyclized and in particular inteins may be utilized to accomplish the cyclization.

[0085] Variant TPO polypeptides of the present invention may also be modified to form chimeric molecules comprising a variant TPO polypeptide fused to another, heterologous polypeptide or amino acid sequence. In one embodiment, such a chimeric molecule comprises a fusion of a variant TPO polypeptide with a tag polypeptide which provides an epitope to which an anti-tag antibody can selectively bind. The epitope tag is generally placed at the amino-or carboxyl-terminus of the variant TPO polypeptide. The presence of such epitope-tagged forms of a variant TPO polypeptide can be detected using an antibody against the tag polypeptide. Also, provision of the epitope tag enables the variant TPO polypeptide to be readily purified by affinity purification using an anti-tag antibody or another type of affinity matrix that binds to the epitope tag. In an alternative embodiment, the chimeric molecule may comprise a fusion of a variant TPO polypeptide with an immunoglobulin or a particular region of an immunoglobulin. For a bivalent form of the chimeric molecule, such a fusion could be to the Fc region of an IgG molecule.

[0086] Various tag polypeptides and their respective antibodies are well known in the art. Examples include poly-histidine (poly-his) or poly-histidine-glycine (poly-his-gly) tags; the flu HA tag polypeptide and its antibody 12CA5 [Field et al., Mol. Cell. Biol. 8:2159-2165 (1988)]; the c-myc tag and the 8F9, 3C7, 6E10, G4, B7 and 9E10 antibodies thereto [Evan et al., Molecular and Cellular Biology, 5:3610-3616 (1985)]; and the Herpes Simplex virus glycoprotein D (gD) tag and its antibody [Paborsky et al., Protein Engineering, 3(6): 547-553 (1990)]. Other tag polypeptides include the Flag-peptide [Hopp et al., BioTechnology 6:1204-1210 (1988)]; the KT3 epitope peptide [Martin et al., Science 255:192-194 (1992)]; tubulin epitope peptide [Skinner et al., J. Biol. Chem. 266:15163-15166 (1991)]; and the T7 gene 10 protein peptide tag [Lutz-Freyermuth et al., Proc. Natl. Acad. Sci. U.S.A. 87:6393-6397 (1990)].

[0087] Generating the Variants

[0088] Variant TPO nucleic acids and proteins of the invention may be produced using a number of methods known in the art.

[0089] Preparing Nucleic Acids Encoding the TPO Variants

[0090] In a preferred embodiment, nucleic acids encoding TPO variants are prepared by total gene synthesis, or by site-directed mutagenesis of a nucleic acid encoding wild type or variant TPO protein. Methods including template-directed ligation, recursive PCR, cassette mutagenesis, site-directed mutagenesis or other techniques that are well known in the art may be utilized.

[0091] Expression Vectors

[0092] In a preferred embodiment, an expression vector that comprises the components described below and a gene encoding a variant TPO protein is prepared. Numerous types of appropriate expression vectors and suitable regulatory sequences are known in the art for a variety of host cells. The expression vectors may contain transcriptional and translational regulatory sequences including but not limited to promoter sequences, ribosomal binding sites, transcriptional start and stop sequences, translational start and stop sequences, transcription terminator signals, polyadenylation signals, and enhancer or activator sequences. In a preferred embodiment, the regulatory sequences include a promoter and transcriptional start and stop sequences. In addition, the expression vector may comprise additional elements. For example, the expression vector may have two replication systems, thus allowing it to be maintained in two organisms, for example in mammalian or insect cells for expression and in a prokaryotic host for cloning and amplification. Furthermore, for integrating expression vectors, the expression vector contains at least one sequence homologous to the host cell genome, and preferably two homologous sequences which flank the expression construct. The integrating vector may be directed to a specific locus in the host cell by selecting the appropriate homologous sequence for inclusion in the vector. Constructs for integrating vectors are well known in the art. In addition, in a preferred embodiment, the expression vector contains a selectable marker gene to allow the selection of transformed host cells. Selection genes are well known in the art and will vary with the host cell used. The expression vectors may be either self-replicating extrachromosomal vectors or vectors which integrate into a host genome.

[0093] A preferred expression vector system is a retroviral vector system such as is generally described in PCT/US97/01019 and PCT/US97/01048, both of which are hereby expressly incorporated by reference.

[0094] Labels and Fusion Constructs

[0095] The expression vector may include a secretory leader sequence or signal peptide sequence that provides for secretion of the variant TPO protein from the host cell. Suitable secretory leader sequences that lead to the secretion of a protein are known in the art. The signal sequence typically encodes a signal peptide comprised of hydrophobic amino acids which direct the secretion of the protein from the cell, as is well known in the art. The protein is either secreted into the growth media or into the periplasmic space, located between the inner and outer membrane of the cell. For expression in bacteria, usually bacterial secretory leader sequences, operably linked to a variant TPO encoding nucleic acid, are preferred.

[0096] Transfection/Transformation

[0097] The variant TPO nucleic acids are introduced into the cells either alone or in combination with an expression vector in a manner suitable for subsequent expression of the nucleic acid. The method of introduction is largely dictated by the targeted cell type, discussed below. Exemplary methods include CaPO₄ precipitation, liposome fusion, lipofectin®, electroporation, viral infection, dextran-mediated transfection, polybrene mediated transfection, protoplast fusion, direct microinjection, etc. The variant TPO nucleic acids may stably integrate into the genome of the host cell or may exist either transiently or stably in the cytoplasm. As outlined herein, a particularly preferred method utilizes retroviral infection, as outlined in PCT US97/01019, incorporated by reference.

[0098] Cell Lines For Expressing TPO Variants

[0099] Appropriate host cells for the expression of TPO variants include yeast, bacteria, archaebacteria, fungi, and insect and animal cells, including mammalian cells. Of particular interest are bacteria such as E. coli and Bacillus subtilis, fungi such as Saccharomyces cerevisiae, Pichia pastoris, and Neurospora, insects such as Drosophila melangaster and insect cell lines such as SF9, mammalian cell lines including 293, CHO, COS, Jurkat, NIH3T3, etc (see the ATCC cell line catalog, hereby expressly incorporated by reference), as well as primary cell lines. In one embodiment, the cells may be additionally genetically engineered, that is, contain exogenous nucleic acid other than the expression vector comprising the variant TPO nucleic acid.

[0100] Expression Methods

[0101] The variant TPO proteins of the present invention are produced by culturing a host cell transformed with an expression vector containing nucleic acid encoding a variant TPO protein, under the appropriate conditions to induce or cause expression of the variant TPO protein. The conditions appropriate for variant TPO protein expression will vary with the choice of the expression vector and the host cell, and will be easily ascertained by one skilled in the art through routine experimentation. For example, the use of constitutive promoters in the expression vector will require optimizing the growth and proliferation of the host cell, while the use of an inducible promoter requires the appropriate growth conditions for induction. In addition, in some embodiments, the timing of the harvest is important. For example, the baculoviral systems used in insect cell expression are lytic viruses, and thus harvest time selection can be crucial for product yield.

[0102] In a preferred embodiment, TPO variants are expressed in E. coli and refolded from inclusion bodies (see Hou, J. and Zhan, H., Cytokine, 10:319-30 (1998)). Bacterial expression systems and methods for their use are well known in the art (see Current Protocols in Molecular Biology, Wiley & Sons, and Molecular Cloning—A Laboratory Manual —3rd Ed., Cold Spring Harbor Laboratory Press, New York (2001)). The choice of codons, suitable expression vectors and suitable host cells will vary depending on a number of factors, and may be easily optimized as needed.

[0103] In an alternate preferred embodiment, TPO variants are expressed in mammalian cells (see for example Kaszubska et. al., Protein Expression and Purification, 18: 213-220 (2000)) or in other expression systems including but not limited to yeast, baculovirus, and in vitro expression systems.

[0104] In one embodiment, the variant TPO nucleic acids, proteins and antibodies of the invention are labeled with a label other than the scaffold.

[0105] By “labeled” herein is meant that a compound has at least one element, isotope or chemical compound attached to enable the detection of the compound. In general, labels fall into three classes: a) isotopic labels, which may be radioactive or heavy isotopes; b) immune labels, which may be antibodies or antigens; and c) colored or fluorescent dyes. The labels may be incorporated into the compound at any position.

[0106] Purification

[0107] In a preferred embodiment, the TPO variants are purified or isolated after expression. Variant TPO proteins may be isolated or purified in a variety of ways known to those skilled in the art depending on what other components are present in the sample. Standard purification methods include electrophoretic, molecular, immunological and chromatographic techniques, including ion exchange, hydrophobic, affinity, and reverse-phase HPLC chromatography, and chromatofocusing. For example, a TPO variant may be purified using a standard anti-recombinant protein antibody column. Ultrafiltration and diafiltration techniques, in conjunction with protein concentration, are also useful. For general guidance in suitable purification techniques, see Scopes, R., Protein Purification, Springer-Verlag, NY, 3rd ed (1994). The degree of purification necessary will vary depending on the desired use, and in some instances no purification will be necessary.

[0108] Posttranslational Modification and Derivatization

[0109] Once made, the variant TPO proteins may be covalently modified. Covalent and non-covalent modifications of the protein are thus included within the scope of the present invention. Such modifications may be introduced into a variant TPO polypeptide by reacting targeted amino acid residues of the polypeptide with an organic derivatizing agent that is capable of reacting with selected side chains or terminal residues. Optimal sites for modification can be chosen using a variety of criteria, including but not limited to, visual inspection, structural analysis, sequence analysis, and molecular simulation.

[0110] In one embodiment, the variant TPO proteins of the invention are labeled with at least one element, isotope or chemical compound. In general, labels fall into three classes: a) isotopic labels, which may be radioactive or heavy isotopes; b) immune labels, which may be antibodies or antigens; and c) colored or fluorescent dyes. The labels may be incorporated into the compound at any position. Labels include but are not limited to biotin, tag (e.g. FLAG, Myc) and fluorescent labels (e.g. fluorescein).

[0111] One type of covalent modification includes reacting targeted amino acid residues of a variant TPO polypeptide with an organic derivatizing agent that is capable of reacting with selected side chains or the N-or C-terminal residues of a variant TPO polypeptide. Derivatization with bifunctional agents is useful, for instance, for cross linking a variant TPO protein to a water-insoluble support matrix or surface for use in the method for purifying anti-variant TPO antibodies or screening assays, as is more fully described below. Commonly used cross linking agents include, e.g., 1,1-bis(diazoacetyl)-2-phenylethane, glutaraldehyde, N-hydroxysuccinimide esters, for example, esters with 4-azidosalicylic acid, homobifunctional imidoesters, including disuccinimidyl esters such as 3,3′-dithiobis(succinimidylpropionate), bifunctional maleimides such as bis-N-maleimido-1,8-octane and agents such as methyl-3-[(p-azidophenyl)dithio] propioimidate.

[0112] Other modifications include deamidation of glutaminyl and asparaginyl residues to the corresponding glutamyl and aspartyl residues, respectively, hydroxylation of proline and lysine, phosphorylation of hydroxyl groups of seryl or threonyl residues, methylation of the amino groups of lysine, arginine, and histidine side chains [T. E. Creighton, Proteins: Structure and Molecular Properties, W. H. Freeman & Co., San Francisco, pp. 79-86 (1983)], acetylation of the N-terminal amine, and amidation of any C-terminal carboxyl group.

[0113] Such derivatization may improve the solubility, absorption, permeability across the blood brain barrier, serum half life, and the like. Modifications of variant TPO polypeptides may alternatively eliminate or attenuate any possible undesirable side effect of the protein. Moieties capable of mediating such effects are disclosed, for example, in Remington's Pharmaceutical Sciences, 16th ed., Mack Publishing Co., Easton, Pa. (1980).

[0114] Another type of covalent modification of variant TPO comprises linking the variant TPO polypeptide to one of a variety of nonproteinaceous polymers, e.g., polyethylene glycol (“PEG”), polypropylene glycol, or polyoxyalkylenes, in the manner set forth in U.S. Pat. Nos. 4,640,835; 4,496,689; 4,301,144; 4,670,417; 4,791,192 or 4,179,337. A variety of coupling chemistries may be used to achieve PEG attachment, as is well known in the art. Examples, include but are not limited to, the technologies of Shearwater and Enzon, which allow modification at primary amines, including but not limited to, lysine groups and the N-terminus. See, Kinstler et al, Advanced Drug Deliveries Reviews, 54, 477-485 (2002) and M J Roberts et al, Advanced Drug Delivery Reviews, 54, 459-476 (2002), both hereby incorporated by reference.

[0115] Assaying the Activity of the Variants

[0116] Variant sequences that are designed to maintain thrombopoietic activity and to have reduced or eliminated immunogenicity may be tested experimentally for activity. As is known to those in the art, several methods may be used to characterize thrombopoiesis activity, including but not limited to those described below.

[0117] In a preferred embodiment, wild type and variant proteins will be analyzed for their ability to induce luciferase expression in an engineered TPO-responsive cell line, BAF-3 (see Duffy et. al., J. Med. Chem. 44:3730-3745 (2001)). Briefly, the cells are transfected with genes encoding the TPO receptor and a luciferase reporter construct. The cells are treated with varying concentrations of wild type or variant TPO, and luminescence is measured.

[0118] In a preferred embodiment, wild type and variant proteins will be analyzed for their ability to sustain viability and growth of the TPO-responsive cell line M-07e (Brizzi et. al., Br. J. Haematol., 76: 203-209 (1990)). When stimulated with TPO, the growth of this megakaryocytoma-derived cell line, which constitutively expresses c-Mpl (the TPO-receptor) and other megakaryocyte markers, can be sustained in a concentration-dependent and saturable manner. A reliable, non-radioactive indicator for cell growth is Alamar Blue, a water-soluble non-toxic fluorometric/colorimetric proliferation indicator that measures cell metabolism (Shahan et. al., J. Immunol. Meth., 175: 181-7 (1994)). Cellular growth and metabolism reduces Alamar Blue, resulting in a blue-to-red color change. Non-viable or quiescent cells do not reduce Alamar Blue and thus no color change is observed.

[0119] Determining the Immunogenicity of the Variants

[0120] In a preferred embodiment, the immunogenicity of the TPO variants is determined experimentally to confirm that the variants do have reduced or eliminated immunogenicity relative to the wild type protein.

[0121] In a preferred embodiment, ex vivo T cell activation assays are used to experimentally quantitate immunogenicity. In this method, antigen presenting cells and naïve T cells from matched donors are challenged with a peptide or whole protein of interest one or more times. Then, T cell activation can be detected using a number of methods, for example by monitoring production of cytokines or measuring uptake of tritiated thymidine. In the most preferred embodiment, interferon gamma production is monitored using Elispot assays (see Schmittel et. al. J. Immunol. Meth., 24: 17-24 (2000)).

[0122] In an alternate embodiment, the TPO variants are analyzed to determine the affinity of one or more peptide regions for one or more MHC alleles. Affinity measurements can be performed in any of a number of ways, such as by using Biacore® or AlphaScreen™ technologies.

[0123] In an alternate preferred embodiment, immunogenicity is measured in transgenic mouse systems. For example, mice expressing fully or partially human Class II MHC molecules may be used. (See Andersson, E. C., Hansen, B. E., Jacobsen, H., Madsen, L. S., Andersen, C. B., Engberg, J., Rothbard, J. B., McDevitt, G. S., Malmstrom, V., Holmdahl, R., Svejgaard, A., And Fugger, L. “Definition of MHC and T cell receptor contacts in the HLA-DR4-restricted immunodominant epitope in type 11 collagen and characterization of collagen-induced arthritis in HLA-DR4 and human CD4 transgenic mice” Proc. Natl. Acad. Sci. USA, 95, 7574-7579 (1998); Taneja, V. and Chella, S. D. “Association of MHC and rheumatoid arthritis Regulatory role of HLA class 11 molecules in animal models of RA: studies on transgenic/knockout mice” Arthritis Res, 2, 205-207 (2000); Forsthuber, T. G., Shive, C. L., Wienhold, W., de Graaf, K., Spack, E. G., Sublett, R., Melms, A., Kort, J., Racke, M. K. and Weissert, R. “T Cell Epitopes of Human Myelin Oligodendrocyte Glycoprotein Identified in HLA-DR4 (DRB1*0401) Transgenic Mice Are Encephalitogenic and Are Presented by Human B Cells”, J. Immunology, 167, 7119-7125 (2001); and Paisansinsup, T., Deshmukh, U.S., Chowdhary, V. S., Luthra, H. S., Fu, S. M. and David, C. S. “HLA Class II Influences the Immune Response and Antibody Diversification to Ro60/Sjogren's Syndrome-A: Heightened Antibody Responses and Epitope Spreading in Mice Expressing HLA-DR molecules” Journal of Immunology, 168, 5876-5884 (2002).) All references cited herein are expressly incorporated in their entirety.

[0124] In an alternate embodiment, immunogenicity is tested by administering the TPO variants to one or more animals, including rodents and primates, and monitoring for antibody formation.

[0125] Administration and Treatment Using TPO Variants

[0126] Once made, the variant TPO proteins and nucleic acids of the invention find use in a number of applications. In a preferred embodiment, the variant TPO proteins are administered to a patient to treat a TPO-related disorder.

[0127] The administration of the variant TPO proteins of the present invention, preferably in the form of a sterile aqueous solution, may be done in a variety of ways, including, but not limited to, orally, parenterally, subcutaneously, intravenously, intranasally, transdermally, intraperitoneally, intramuscularly, intrapulmonary, vaginally, rectally, intranasally or intraocularly. In some instances, the variant TPO protein may be directly applied as a solution or spray. Depending upon the manner of introduction, the pharmaceutical composition may be formulated in a variety of ways. The concentration of the therapeutically active variant TPO protein in the formulation may vary from about 0.1 to 100 weight %. In another preferred embodiment, the concentration of the variant TPO protein is in the range of 0.003 to 1.0 molar, with dosages from 0.03, 0.05, 0.1, 0.2, and 0.3 millimoles per kilogram of body weight being preferred.

[0128] The pharmaceutical compositions of the present invention comprise a variant TPO protein in a form suitable for administration to a patient. In a preferred embodiment, the pharmaceutical compositions are in a water-soluble form, such as being present as pharmaceutically acceptable salts, which is meant to include both acid and base addition salts.

[0129] The pharmaceutical compositions may also include one or more of the following: carrier proteins such as serum albumin; buffers such as NaOAc; fillers such as microcrystalline cellulose, lactose, corn and other starches; binding agents; sweeteners and other flavoring agents; coloring agents; and polyethylene glycol. Additives are well known in the art, and are used in a variety of formulations.

[0130] In a further embodiment, the variant TPO proteins are added in a micellular formulation; see U.S. Pat. No. 5,833,948, hereby expressly incorporated by reference in its entirety.

[0131] Combinations of pharmaceutical compositions may be administered. Moreover, the compositions may be administered in combination with other therapeutics.

[0132] In a preferred embodiment, the nucleic acid encoding the variant TPO proteins may also be used in gene therapy. In gene therapy applications, genes are introduced into cells in order to achieve in vivo synthesis of a therapeutically effective genetic product, for example for replacement of a defective gene. “Gene therapy” includes both conventional gene therapy where a lasting effect is achieved by a single treatment, and the administration of gene therapeutic agents, which involves the one time or repeated administration of a therapeutically effective DNA or mRNA. Antisense RNAs and DNAs can be used as therapeutic agents for blocking the expression of certain genes in vivo. It has already been shown that short antisense oligonucleotides can be imported into cells where they act as inhibitors, despite their low intracellular concentrations caused by their restricted uptake by the cell membrane. [Zamecnik et al., Proc. Natl. Acad. Sci. U.S.A. 83:4143-4146 (1986)]. The oligonucleotides can be modified to enhance their uptake, e.g. by substituting their negatively charged phosphodiester groups by uncharged groups.

[0133] There are a variety of techniques available for introducing nucleic acids into viable cells. The techniques vary depending upon whether the nucleic acid is transferred into cultured cells in vitro, or in vivo in the cells of the intended host. Techniques suitable for the transfer of nucleic acid into mammalian cells in vitro include the use of liposomes, electroporation, microinjection, cell fusion, DEAE-dextran, the calcium phosphate precipitation method, etc. The currently preferred in vivo gene transfer techniques include transfection with viral (typically retroviral) vectors and viral coat protein-liposome mediated transfection [Dzau et al., Trends in Biotechnology 11:205-210 (1993)]. In some situations it is desirable to provide the nucleic acid source with an agent that targets the target cells, such as an antibody specific for a cell surface membrane protein or the target cell, a ligand for a receptor on the target cell, etc. Where liposomes are employed, proteins which bind to a cell surface membrane protein associated with endocytosis may be used for targeting and/or to facilitate uptake, e.g. capsid proteins or fragments thereof tropic for a particular cell type, antibodies for proteins which undergo internalization in cycling, proteins that target intracellular localization and enhance intracellular half-life. The technique of receptor-mediated endocytosis is described, for example, by Wu et al., J. Biol. Chem. 262:4429-4432 (1987); and Wagner et al., Proc. Natl. Acad. Sci. U.S.A. 87:3410-3414 (1990). For review of gene marking and gene therapy protocols see Anderson et al., Science 256:808-813 (1992).

[0134] All references cited herein, including patents, patent applications (provisional, utility and PCT), and incorporated by reference in their entirety.

### EXAMPLES

### Example 1

### Identification of MHC-binding Epitopes in Native TPO

[0135] In order to find MHC-binding epitopes, each 9-residue fragment of native human TPO (SEQ ID NO:2) was analyzed for its propensity to bind to each of 52 Class II MHC alleles for which peptide binding affinity matrices have been derived (Sturniolo, supra). The calculations were performed using cutoffs of 1%, 3%, and 5%. The number of alleles that each peptide is predicted to bind at each of these cutoffs are shown below. 9-mer peptides that are not listed below are not predicted to bind to any alleles at the 5%, 3%, or 1% cutoffs.

| First | Last | 9-mer sequence | 1% | 3% | 5% |
|---|---|---|---|---|---|
| residue | residue | from SEQ ID NO: 2 | Hits | Hits | Hits |
| 9 | 17 | LRVLSKLLR | 17 | 31 | 36 |
| 11 | 19 | VLSKLLRDS | 9 | 14 | 17 |
| 15 | 23 | LLRDSHVLH | 5 | 6 | 7 |
| 16 | 24 | LRDSHVLHS | 4 | 13 | 21 |
| 22 | 30 | LHSRLSQCP | 0 | 0 | 1 |
| 32 | 40 | VHPLPTPVL | 0 | 0 | 1 |
| 39 | 47 | VLLPAVDFS | 0 | 0 | 4 |
| 63 | 71 | ILGAVTLLL | 0 | 3 | 9 |
| 64 | 72 | LGAVTLLLE | 0 | 0 | 1 |
| 69 | 77 | LLLEGVMAA | 2 | 8 | 14 |
| 90 | 98 | LGQLSGQVR | 0 | 0 | 2 |
| 97 | 105 | VRLLLGALQ | 6 | 25 | 32 |
| 101 | 109 | LGALQSLLG | 0 | 0 | 1 |
| 104 | 112 | LQSLLGTQL | 1 | 2 | 2 |
| 127 | 135 | IFLSFQHLL | 0 | 2 | 2 |
| 128 | 136 | FLSFQHLLR | 0 | 3 | 6 |
| 131 | 139 | FQHLLRGKV | 0 | 3 | 6 |
| 134 | 142 | LLRGKVRFL | 0 | 0 | 1 |
| 135 | 143 | LRGKVRFLM | 17 | 18 | 21 |
| 139 | 147 | VRFLMLVGG | 0 | 5 | 21 |
| 141 | 149 | FLMLVGGST | 0 | 1 | 4 |
| 142 | 150 | LMLVGGSTL | 0 | 1 | 6 |
| 144 | 152 | LVGGSTLCV | 0 | 8 | 11 |
| 152 | 160 | VRRAPPTTA | 1 | 10 | 17 |
| 167 | 175 | LVLTLNELP | 0 | 3 | 3 |
| 171 | 179 | LNELPNRTS | 0 | 0 | 1 |
| 200 | 208 | WQQGFRAKI | 0 | 0 | 2 |
| 204 | 212 | FRAKIPGLL | 2 | 3 | 6 |
| 208 | 216 | IPGLLNQTS | 0 | 0 | 2 |
| 211 | 219 | LLNQTSRSL | 0 | 0 | 6 |
| 232 | 240 | LLNGTRGLF | 0 | 1 | 2 |
| 283 | 291 | YTLFPLPPT | 0 | 1 | 1 |
| 296 | 304 | VVQLHPLLP | 3 | 8 | 12 |
| 297 | 305 | VQLHPLLPD | 1 | 5 | 10 |
| 318 | 326 | LNTSYTHSQ | 0 | 2 | 7 |
| 322 | 330 | YTHSQNLSQ | 0 | 2 | 2 |

[0136] Based on the above analysis, the 9-mer residues that are predicted to bind to the most MHC alleles are residues 9-17, 11-19, 16-24, 69-77, 97-105, 135-143, 139-147, 144-152, 152-160, 296-304, and 297-305.

[0137] Each 9-residue fragment of native human TPO (SEQ ID NO:2) was also analyzed to determine the percent of the United States population with at least one allele that binds the 9-mer peptide. The calculations were performed using a 5% cutoff.

| Start | End | Sequence from SEQ ID NO:2 | % pop |
|---|---|---|---|
| 9 | 17 | LRVLSKLLR | 58.69% |
| 11 | 19 | VLSKLLRDS | 21.21% |
| 15 | 23 | LLRDSHVLH | 21.29% |
| 16 | 24 | LRDSHVLHS | 44.64% |
| 22 | 30 | LHSRLSQCP | 1.73% |
| 32 | 40 | VHPLPTPVL | 4.96% |
| 63 | 71 | ILGAVTLLL | 33.54% |
| 69 | 77 | LLLEGVMAA | 22.70% |
| 90 | 98 | LGQLSGQVR | 0.00% |
| 97 | 105 | VRLLLGALQ | 39.93% |
| 104 | 112 | LQSLLGTQL | 16.61% |
| 127 | 135 | IFLSFQHLL | 24.75% |
| 128 | 136 | FLSFQHLLR | 20.92% |
| 131 | 139 | FQHLLRGKV | 13.23% |
| 134 | 142 | LLRGKVRFL | 1.73% |
| 135 | 143 | LRGKVRFLM | 53.69% |
| 139 | 147 | VRFLMLVGG | 49.72% |
| 141 | 149 | FLMLVGGST | 14.02% |
| 142 | 150 | LMLVGGSTL | 37.25% |
| 144 | 152 | LVGGSTLCV | 41.37% |
| 152 | 160 | VRRAPPTTA | 25.09% |
| 167 | 175 | LVLTLNELP | 13.99% |
| 171 | 179 | LNELPNRTS | 1.73% |
| 204 | 212 | FRAKIPGLL | 5.14% |
| 208 | 216 | IPGLLNQTS | 5.94% |
| 211 | 219 | LLNQTSRSL | 16.45% |
| 232 | 240 | LLNGTRGLF | 21.29% |
| 283 | 291 | YTLFPLPPT | 2.01% |
| 296 | 304 | VVQLHPLLP | 36.88% |
| 297 | 305 | VQLHPLLPD | 19.82% |
| 318 | 326 | LNTSYTHSQ | 19.10% |
| 322 | 330 | YTHSQNLSQ | 13.99% |

[0138] Based on the above analysis, the 9-mer residues that are predicted to bind to alleles that are present at least 20% of the United States population are residues 9-17, 11-19, 15-23, 16-24, 63-71, 69-77, 97-105, 127-135, 128-136, 135-143, 139-147, 142-150, 144-152, 152-160, 232-240, and 296-304.

[0139] The sequence of wild type human TPO (SEQ ID NO:2) was also compared to peptides that are known to bind human class II MHC alleles. Regions of TPO that are similar to known binders may bind to MHC molecules. The program RANKPEP (mifoundation.org/Tools/rankpep) was used to identify epitopes that may bind to the following human Class II MHC alleles: DRB1*0101, DRB1*0301, DRB1*0401, DRB1*0701, DRB1*1101, DRB1*1301, DRB1*1501, DRB4*0101, DRB5*0101, DQA1*0101/DQB1*0501, DQA1*0501/DQB1*0201, DQA1*0102/DQB1*0602, and DPA1*0201/DPB1*0901.9-mer peptides that are similar to known MHC binders include:

| START POS. | SEQUENCE FROM SEQ ID NO:2 | SCORE | % OPT. |
|---|---|---|---|
| 3 | APPACDLRV | 12 | 23.54% |
| 8 | DLRVLSKLL | 76 | 60.80% |
| 25 | RLSQCPEVH | 77 | 61.60% |
| 44 | VDFSLGEWK | 63 | 48.46% |
| 52 | KTQMEETKA | 59 | 47.20% |
| 54 | QMEETKAQD | 63 | 50.40% |
| 63 | ILGAVTLLL | 14 | 32.06% |
| 86 | LSSLLGQLS | 69 | 51.88% |
| 101 | LGALQSLLG | 61 | 45.86% |
| 104 | LQSLLGTQL | 67 | 50.38% |
| 127 | IFLSFQHLL | 9 | 21.34% |
| 128 | FLSFQHLLR | 10 | 22.62% |
| 135 | LRGKVRFLM | 10 | 14.68% |
| 139 | VRFLMLVGG | 70 | 53.85% |
| 141 | FLMLVGGST | 61 | 45.86% |
| 152 | VRRAPPTTA | 71 | 54.62% |
| 160 | AVPSRTSLV | 15 | 29.20% |
| 184 | TNFTASART | 59 | 45.38% |
| 186 | FTASARTTG | 9 | 21.32% |
| 198 | LKWQQGFRA | 18 | 27.76% |
| 199 | KWQQGFRAK | 18 | 27.37% |
| 200 | WQQGFRAKI | 11 | 16.46% |
| 215 | TSRSLDQIP | 65 | 52.00% |
| 229 | IHELLNGTR | 61 | 46.92% |
| 322 | YTHSQNLSQ | 62 | 46.62% |

[0140] These identify the region from residues 135-149 as being especially likely to contain MHC-binding epitopes.

### Example 2

### Identification of Less Immunogenic Variants of Epitopes 1-4

[0141] Several methods were used to generate alternate sequences for epitopes 1-4 that are predicted to confer decreased immunogenicity.

[0142] Altering the Three Residues that Contribute Most to MHC Binding

[0143] Here, the matrix method was used to identify which of the 9 amino acid positions within the epitope(s) contribute most to the overall binding propensities for each particular allele “hit”. This analysis considers which positions (P1-P9) are occupied by amino acids with propensity scores that are consistently large and positive for alleles scoring above the threshold values. The matrix method was then used to identify amino acid substitutions at said positions that would decrease or eliminate predicted immunogenicity. PDA® technology was used to determine which of the alternate sequences with reduced or eliminated immunogenicity are compatible with maintaining the structure and function of the protein.

[0144] Using the above approach, the following positions in the 9-17 epitope were found to make the greatest overall contribution to binding propensity scores: L9, R10, and K14. The binding score for many different alleles, and hence immunogenicity, can be decreased by incorporating mutations including, but not limited to, the following: L9A, L9C, L9D, L9E, L9G, L9H, L9K, L9N, L9P, L9Q, L9R, L9S, L9T, R10A, R1OC, R1OD, R10E, R10F, R10G, R10H, R10I, R10K, R10L, R10M, R10N, R10P, R10Q, R10S, R10T, R10W, R10Y, K14A, K14D, K14E, and K14Q. Point mutations that are especially effective in reducing immunogenicity include, but are not limited to, L9A, L9C, L9D, L9E, L9G, L9H, L9K, L9N, L9P, L9Q, L9R, L9S, L9T, R10A, R10C, R10D, and R10P. It is also possible to identify sequences that contain two or more mutations that each contributes to immunogenicity reduction.

[0145] Alternate sequences with decreased immunogenicity include, but are not limited to, those shown below. The number of hits for the 9-179mer at 1%, 3%, and 5% thresholds is shown. The number of hits for all overlapping 9mers (that is, 1-9,2-10, 3-11, 4-12, 5-13, 6-14, 7-15, 8-16, 10-18, 11-19, 12-20, 13-21, 14-22, 15-23, 16-24, and 17-25) at 1%, 3%, and 5% thresholds is also shown. The wild-type sequence and matrix scores are shown in the top row of data for reference.

| sequence | anchor | anchor | anchor | overlap | overlap | overlap |
|---|---|---|---|---|---|---|
| at residues 9-17 | 1% | 3% | 5% | 1% | 3% | 5% |
| LRVLSKLLR (SEQ ID NO: 2) | 17 | 31 | 36 | 18 | 33 | 45 |
| SRVLSKLLR (SEQ ID NO: 4) | 0 | 0 | 0 | 18 | 33 | 45 |
| KRVLSKLLR (SEQ ID NO: 5) | 0 | 0 | 0 | 18 | 33 | 45 |
| RRVLSKLLR (SEQ ID NO: 6) | 0 | 0 | 0 | 18 | 33 | 45 |
| ERVLSKLLR (SEQ ID NO: 7) | 0 | 0 | 0 | 18 | 33 | 45 |
| LDVLSKLLR (SEQ ID NO: 8) | 0 | 0 | 0 | 18 | 33 | 45 |
| LEVLSKLLR (SEQ ID NO: 9) | 0 | 6 | 9 | 18 | 33 | 45 |
| LSVLSKLLR (SEQ ID NO: 10) | 0 | 5 | 6 | 18 | 33 | 45 |
| LTVLSKLLR (SEQ ID NO: 11) | 0 | 5 | 9 | 18 | 33 | 45 |
| LRVLSELLR (SEQ ID NO: 12) | 0 | 4 | 7 | 9 | 19 | 28 |
| LRVLSDLLR (SEQ ID NO: 13) | 0 | 2 | 4 | 9 | 25 | 35 |
| LDVLSDLLR (SEQ ID NO: 14) | 0 | 0 | 0 | 9 | 25 | 35 |
| LDVLSELLR (SEQ ID NO: 15) | 0 | 0 | 0 | 9 | 19 | 28 |
| LDVLSRLLR (SEQ ID NO: 16) | 0 | 0 | 0 | 10 | 31 | 45 |
| LEVLSDLLR (SEQ ID NO: 17) | 0 | 0 | 0 | 9 | 25 | 35 |
| LEVLSELLR (SEQ ID NO: 18) | 0 | 0 | 0 | 9 | 19 | 28 |
| LEVLSRLLR (SEQ ID NO: 19) | 0 | 5 | 6 | 10 | 31 | 45 |
| LSVLSDLLR (SEQ ID NO: 20) | 0 | 0 | 0 | 9 | 25 | 35 |
| LSVLSELLR (SEQ ID NO: 21) | 0 | 0 | 0 | 9 | 19 | 28 |
| LSVLSRLLR (SEQ ID NO: 22) | 0 | 2 | 5 | 10 | 31 | 45 |
| LTVLSDLLR (SEQ ID NO: 23) | 0 | 0 | 0 | 9 | 25 | 35 |
| LTVLSELLR (SEQ ID NO: 24) | 0 | 0 | 0 | 9 | 19 | 28 |
| LTVLSRLLR (SEQ ID NO: 25) | 0 | 5 | 6 | 10 | 31 | 45 |

[0146] Using the above approach, the following positions in the 135-143 epitope make the greatest overall contribution to binding propensity scores: R136, K138, and R140. The binding score for many different alleles, and hence immunogenicity, can be decreased by incorporating mutations including, but not limited to, the following: R136A, R136C, R136D, R136E, R136F, R136G, R136H, R136I, R136K, R136L, R136M, R136N, R136P, R136Q, R136S, R136T, R136W, R136Y, K138A, K138P, R140A, R140D, R140E, and R140Q. It is also possible to identify sequences that contain two or more mutations that each contributes to immunogenicity reduction.

[0147] Alternate sequences with decreased immunogenicity include, but are not limited to, those shown below. The number of hits for the 135-439mer at 1%, 3%, and 5% thresholds is shown. The number of hits for all overlapping 9mers (that is, 127-135, 128-136, 129-137, 130-138, 131-139, 132-140, 133-141, 134-142, 136-144, 137-145,138-146, 139-147, 140-148, 141-149, 142-150, and 143-151) at 1%, 3%, and 5% thresholds is also shown. The wild-type sequence and ImmunoFilter scores are shown in the top row of data for reference.

| sequence | anchor | anchor | anchor | overlap | overlap | overlap |
|---|---|---|---|---|---|---|
| at residues 135-143 | 1% | 3% | 5% | 1% | 3% | 5% |
| LRGKVRFLM (SEQ ID NO: 2) | 17 | 18 | 21 | 0 | 15 | 46 |
| LDGKVRFLM (SEQ ID NO: 26) | 0 | 0 | 0 | 0 | 11 | 35 |
| LEGKVRFLM (SEQ ID NO: 27) | 0 | 3 | 11 | 1 | 11 | 36 |
| LQGKVRFLM (SEQ ID NO: 28) | 7 | 17 | 17 | 2 | 15 | 47 |
| LKGKVRFLM (SEQ ID NO: 29) | 6 | 16 | 17 | 1 | 14 | 46 |
| LRGKVDFLM (SEQ ID NO: 30) | 0 | 0 | 0 | 0 | 10 | 24 |
| LRGKVEFLM (SEQ ID NO: 31) | 0 | 3 | 4 | 0 | 10 | 28 |
| LRGNVDFLM (SEQ ID NO: 32) | 0 | 0 | 0 | 0 | 10 | 24 |
| LRGQVDFLM (SEQ ID NO: 33) | 0 | 0 | 0 | 0 | 10 | 24 |
| LRGSVDFLM (SEQ ID NO: 34) | 0 | 0 | 0 | 0 | 10 | 24 |
| LRGTVDFLM (SEQ ID NO: 35) | 0 | 0 | 0 | 0 | 10 | 24 |
| LRGRVDFLM (SEQ ID NO: 36) | 0 | 0 | 1 | 0 | 10 | 24 |
| LRGNVEFLM (SEQ ID NO: 37) | 0 | 0 | 0 | 0 | 10 | 28 |
| LRGSVEFLM (SEQ ID NO: 38) | 0 | 0 | 0 | 0 | 10 | 28 |
| LRGRVEFLM (SEQ ID NO: 39) | 0 | 0 | 1 | 0 | 10 | 28 |
| LRGQVEFLM (SEQ ID NO: 40) | 0 | 0 | 3 | 0 | 10 | 28 |
| LRGTVEFLM (SEQ ID NO: 41) | 0 | 0 | 0 | 0 | 10 | 28 |

[0148] Ensure Compatibility with Structure and Function

[0149] Alternate methods can also be used to identify less immunogenic sequences. Here, positions P1-P4, P6, P7, and P9 in each MHC binding epitope were analyzed to identify a subset of amino acid substitutions that are potentially compatible with maintaining the structure and function of the protein. The subset of amino acids was initially selected by visual inspection and analysis of prior mutagenesis data, discussed above.

[0150] All possible combinations of selected amino acids were then analyzed using matrix method calculations, and sequences with significantly decreased immunogenicity were identified.

[0151] Sequences that reduce or eliminate the predicted MHC binding of residues 9-17 and do not vary the functionally important residue R10 include, but are not limited to, those shown below. These sequences eliminate all hits in the 9-17 epitope and also eliminate all or nearly all of the hits in the overlapping epitopes. The wild-type sequence and matrix method scores are shown in the top row of data for reference. In all of the variants shown below, it is possible to replace A9 with alternate non-hydrophobic residues, including D, E, G, H, K, N, Q, R, S, and T.

| sequence | anchor | anchor | anchor | overlap | overlap | overlap |
|---|---|---|---|---|---|---|
| at residues 9-17 | 1% | 3% | 5% | 1% | 3% | 5% |
| LRVLSKLLR (SEQ ID NO: 2) | 17 | 31 | 36 | 18 | 33 | 45 |
| ARALSKLLE (SEQ ID NO: 42) | 0 | 0 | 0 | 0 | 0 | 0 |
| ARALSKALE (SEQ ID NO: 43) | 0 | 0 | 0 | 0 | 0 | 0 |
| ARALSKALS (SEQ ID NO: 44) | 0 | 0 | 0 | 0 | 0 | 0 |
| ARALSKALA (SEQ ID NO: 45) | 0 | 0 | 0 | 0 | 0 | 0 |
| ARALSKILE (SEQ ID NO: 46) | 0 | 0 | 0 | 0 | 0 | 0 |
| ARALSKVLE (SEQ ID NO: 47) | 0 | 0 | 0 | 0 | 0 | 0 |
| ARALSRLLE (SEQ ID NO: 48) | 0 | 0 | 0 | 0 | 0 | 0 |
| ARALSRALE (SEQ ID NO: 49) | 0 | 0 | 0 | 0 | 0 | 0 |
| ARALSRALS (SEQ ID NO: 50) | 0 | 0 | 0 | 0 | 0 | 0 |
| ARALSRALA (SEQ ID NO: 51) | 0 | 0 | 0 | 0 | 0 | 0 |
| ARALSRILE (SEQ ID NO: 52) | 0 | 0 | 0 | 0 | 0 | 0 |
| ARALSRVLE (SEQ ID NO: 53) | 0 | 0 | 0 | 0 | 0 | 0 |
| ARVLSKLLE (SEQ ID NO: 54) | 0 | 0 | 0 | 0 | 0 | 1 |
| ARVLSKALE (SEQ ID NO: 55) | 0 | 0 | 0 | 0 | 0 | 1 |
| ARVLSKILE (SEQ ID NO: 56) | 0 | 0 | 0 | 0 | 0 | 1 |
| ARVLSKVLE (SEQ ID NO: 57) | 0 | 0 | 0 | 0 | 0 | 1 |
| ARVLSRLLE (SEQ ID NO: 58) | 0 | 0 | 0 | 0 | 0 | 1 |
| ARVLSRALE (SEQ ID NO: 59) | 0 | 0 | 0 | 0 | 0 | 1 |
| ARVLSRILE (SEQ ID NO: 60) | 0 | 0 | 0 | 0 | 0 | 1 |
| ARVLSRVLE (SEQ ID NO: 61) | 0 | 0 | 0 | 0 | 0 | 1 |
| ARILSKLLE (SEQ ID NO: 62) | 0 | 0 | 0 | 0 | 0 | 1 |
| ARILSKALE (SEQ ID NO: 63) | 0 | 0 | 0 | 0 | 0 | 1 |
| ARILSKILE (SEQ ID NO: 64) | 0 | 0 | 0 | 0 | 0 | 1 |
| ARILSKVLE (SEQ ID NO: 65) | 0 | 0 | 0 | 0 | 0 | 1 |
| ARILSRLLE (SEQ ID NO: 66) | 0 | 0 | 0 | 0 | 0 | 1 |
| ARILSRALE (SEQ ID NO: 67) | 0 | 0 | 0 | 0 | 0 | 1 |
| ARILSRILE (SEQ ID NO: 68) | 0 | 0 | 0 | 0 | 0 | 1 |
| ARILSRVLE (SEQ ID NO: 69) | 0 | 0 | 0 | 0 | 0 | 1 |

[0152] It is also possible to identify sequences with reduced immunogenicity that do not include mutations at the anchor position, L9, or which include an alternate hydrophobic residue at position 9. The wild-type sequence and matrix method scores are shown in the top row of data for reference.

| sequence | anchor | anchor | anchor | overlap | overlap | overlap |
|---|---|---|---|---|---|---|
| at residues 9-17 | 1% | 3% | 5% | 1% | 3% | 5% |
| LRVLSKLLR (SEQ ID NO: 2) | 17 | 31 | 36 | 18 | 33 | 45 |
| LRALSRVLE (SEQ ID NO: 70) | 1 | 4 | 8 | 0 | 0 | 0 |
| IRALSRVLE (SEQ ID NO: 71) | 1 | 4 | 8 | 0 | 0 | 0 |
| VRALSRVLE (SEQ ID NO: 72) | 1 | 4 | 8 | 0 | 0 | 0 |
| LRALSKVLE (SEQ ID NO: 73) | 2 | 7 | 9 | 0 | 0 | 0 |
| IRALSKVLE (SEQ ID NO: 74) | 2 | 7 | 9 | 0 | 0 | 0 |
| VRALSKVLE (SEQ ID NO: 75) | 2 | 7 | 9 | 0 | 0 | 0 |
| LRALSRALE (SEQ ID NO: 76) | 4 | 6 | 14 | 0 | 0 | 0 |
| IRALSRALE (SEQ ID NO: 77) | 4 | 6 | 14 | 0 | 0 | 0 |
| VRALSRALE (SEQ ID NO: 78) | 4 | 6 | 14 | 0 | 0 | 0 |

[0153] Less immunogenic sequences were also identified for the residue 69-77 epitope. These sequences eliminate all hits in the 69-77 epitope and also eliminate nearly all of the hits in the overlapping epitopes. The wild-type sequence and matrix method scores are shown in the top row of data for reference.

| sequence | anchor | anchor | anchor | overlap | overlap | overlap |
|---|---|---|---|---|---|---|
| at residues 69-77 | 1% | 3% | 5% | 1% | 3% | 5% |
| LLLEGVMAA (SEQ ID NO: 2) | 2 | 8 | 14 | 0 | 3 | 10 |
| ALLEGVMAA (SEQ ID NO: 79) | 0 | 0 | 0 | 0 | 0 | 1 |
| ALLEGVKAA (SEQ ID NO: 80) | 0 | 0 | 0 | 0 | 0 | 1 |
| ALLEGVLAA (SEQ ID NO: 81) | 0 | 0 | 0 | 0 | 0 | 1 |
| ALLEGVQAA (SEQ ID NO: 82) | 0 | 0 | 0 | 0 | 0 | 1 |
| ALLEGAMAA (SEQ ID NO: 83) | 0 | 0 | 0 | 0 | 0 | 1 |
| ALLEGAKAA (SEQ ID NO: 84) | 0 | 0 | 0 | 0 | 0 | 1 |
| ALLEGALAA (SEQ ID NO: 85) | 0 | 0 | 0 | 0 | 0 | 1 |
| ALLEGAQAA (SEQ ID NO: 86) | 0 | 0 | 0 | 0 | 0 | 1 |
| ALLEGLMAA (SEQ ID NO: 87) | 0 | 0 | 0 | 0 | 0 | 1 |
| ALLEGLKAA (SEQ ID NO: 88) | 0 | 0 | 0 | 0 | 0 | 1 |
| ALLEGLLAA (SEQ ID NO: 89) | 0 | 0 | 0 | 0 | 0 | 1 |
| ALLEGLQAA (SEQ ID NO: 90) | 0 | 0 | 0 | 0 | 0 | 1 |
| QLLEGVMAA (SEQ ID NO: 91) | 0 | 0 | 0 | 0 | 1 | 1 |
| QLLEGVKAA (SEQ ID NO: 92) | 0 | 0 | 0 | 0 | 1 | 1 |
| QLLEGVLAA (SEQ ID NO: 93) | 0 | 0 | 0 | 0 | 1 | 1 |
| QLLEGVQAA (SEQ ID NO: 94) | 0 | 0 | 0 | 0 | 1 | 1 |
| QLLEGAMAA (SEQ ID NO: 95) | 0 | 0 | 0 | 0 | 1 | 1 |
| QLLEGAKAA (SEQ ID NO: 96) | 0 | 0 | 0 | 0 | 1 | 1 |
| QLLEGALAA (SEQ ID NO: 97) | 0 | 0 | 0 | 0 | 1 | 1 |
| QLLEGAQAA (SEQ ID NO: 98) | 0 | 0 | 0 | 0 | 1 | 1 |
| QLLEGLMAA (SEQ ID NO: 99) | 0 | 0 | 0 | 0 | 1 | 1 |
| QLLEGLKAA (SEQ ID NQ: 100) | 0 | 0 | 0 | 0 | 1 | 1 |
| QLLEGLLAA (SEQ ID NO: 101) | 0 | 0 | 0 | 0 | 1 | 1 |
| QLLEGLQAA (SEQ ID NO: 102) | 0 | 0 | 0 | 0 | 1 | 1 |
| QLLKGVMAA (SEQ ID NO: 103) | 0 | 0 | 0 | 0 | 1 | 1 |
| QLLKGVKAA (SEQ ID NO: 104) | 0 | 0 | 0 | 0 | 1 | 1 |
| QLLKGVLAA (SEQ ID NO: 105) | 0 | 0 | 0 | 0 | 1 | 1 |
| QLLKGAMAA (SEQ ID NO: 106) | 0 | 0 | 0 | 0 | 1 | 1 |
| QLLKGAKAA (SEQ ID NO: 107) | 0 | 0 | 0 | 0 | 1 | 1 |
| QLLKGALAA (SEQ ID NO: 108) | 0 | 0 | 0 | 0 | 1 | 1 |

[0154] Less immunogenic sequences were also identified for the residue 97-105 epitope. These sequences eliminate all hits in the 97-105 epitope and also eliminate nearly all of the hits in the overlapping epitopes. The wild-type sequence and matrix method scores are shown in the top row of data for reference.

| sequence | anchor | anchor | anchor | overlap | overlap | overlap |
|---|---|---|---|---|---|---|
| at residues 97-105 | 1% | 3% | 5% | 1% | 3% | 5% |
| VRLLLGALQ (SEQ ID NO: 2) | 6 | 25 | 32 | 1 | 2 | 3 |
| VKLILGALE (SEQ ID NO: 109) | 0 | 0 | 0 | 0 | 0 | 2 |
| VKVLLGALE (SEQ ID NO: 110) | 0 | 0 | 0 | 0 | 0 | 2 |
| VKVLLGSLE (SEQ ID NO: 111) | 0 | 0 | 0 | 0 | 0 | 2 |
| VKVILGALE (SEQ ID NO: 112) | 0 | 0 | 0 | 0 | 0 | 2 |
| VKVILGSLE (SEQ ID NO: 113) | 0 | 0 | 0 | 0 | 0 | 2 |
| VQVLLGALE (SEQ ID NO: 114) | 0 | 0 | 0 | 0 | 0 | 2 |
| VQVLLGSLE (SEQ ID NO: 115) | 0 | 0 | 0 | 0 | 0 | 2 |
| VQVILGALE (SEQ ID NO: 116) | 0 | 0 | 0 | 0 | 0 | 2 |
| IKLILGALE (SEQ ID NO: 117) | 0 | 0 | 0 | 0 | 0 | 2 |
| IKVLLGALE (SEQ ID NO: 118) | 0 | 0 | 0 | 0 | 0 | 2 |
| IKVLLGSLE (SEQ ID NO: 119) | 0 | 0 | 0 | 0 | 0 | 2 |
| IKVILGALE (SEQ ID NO: 120) | 0 | 0 | 0 | 0 | 0 | 2 |
| IKVILGSLE (SEQ ID NO: 121) | 0 | 0 | 0 | 0 | 0 | 2 |
| IQVLLGALE (SEQ ID NO: 122) | 0 | 0 | 0 | 0 | 0 | 2 |
| IQVLLGSLE (SEQ ID NO: 123) | 0 | 0 | 0 | 0 | 0 | 2 |
| IQVILGALE (SEQ ID NO: 124) | 0 | 0 | 0 | 0 | 0 | 2 |
| TRLLLGALE (SEQ ID NO: 125) | 0 | 0 | 0 | 0 | 0 | 2 |
| TRLLLGSLE (SEQ ID NO: 126) | 0 | 0 | 0 | 0 | 0 | 2 |
| TRLILGALE (SEQ ID NO: 127) | 0 | 0 | 0 | 0 | 0 | 2 |
| TRLILGSLE (SEQ ID NO: 128) | 0 | 0 | 0 | 0 | 0 | 2 |
| TRILLGALE (SEQ ID NO: 129) | 0 | 0 | 0 | 0 | 0 | 2 |
| TRILLGSLE (SEQ ID NO: 130) | 0 | 0 | 0 | 0 | 0 | 2 |
| TRIILGALE (SEQ ID NO: 131) | 0 | 0 | 0 | 0 | 0 | 2 |
| TRIILGSLE (SEQ ID NO: 132) | 0 | 0 | 0 | 0 | 0 | 2 |
| TRVLLGALE (SEQ ID NO: 133) | 0 | 0 | 0 | 0 | 0 | 2 |
| TRVLLGSLE (SEQ ID NO: 134) | 0 | 0 | 0 | 0 | 0 | 2 |
| TRVILGALE (SEQ ID NO: 135) | 0 | 0 | 0 | 0 | 0 | 2 |
| TRVILGSLE (SEQ ID NO: 136) | 0 | 0 | 0 | 0 | 0 | 2 |
| TKLLLGALE (SEQ ID NO: 137) | 0 | 0 | 0 | 0 | 0 | 2 |
| TKLLLGSLE (SEQ ID NO: 138) | 0 | 0 | 0 | 0 | 0 | 2 |
| TKLILGALE (SEQ ID NO: 139) | 0 | 0 | 0 | 0 | 0 | 2 |
| TKLILGSLE (SEQ ID NO: 140) | 0 | 0 | 0 | 0 | 0 | 2 |
| TKILLGALE (SEQ ID NO: 141) | 0 | 0 | 0 | 0 | 0 | 2 |
| TKILLGSLE (SEQ ID NO: 142) | 0 | 0 | 0 | 0 | 0 | 2 |
| TKIILGALE (SEQ ID NO: 143) | 0 | 0 | 0 | 0 | 0 | 2 |
| TKIILGSLE (SEQ ID NO: 144) | 0 | 0 | 0 | 0 | 0 | 2 |
| TKVLLGALE (SEQ ID NO: 145) | 0 | 0 | 0 | 0 | 0 | 2 |
| TKVLLGSLE (SEQ ID NO: 146) | 0 | 0 | 0 | 0 | 0 | 2 |
| TKVILGALE (SEQ ID NO: 147) | 0 | 0 | 0 | 0 | 0 | 2 |
| TKVILGSLE (SEQ ID NO: 148) | 0 | 0 | 0 | 0 | 0 | 2 |
| TQLLLGALE (SEQ ID NO: 149) | 0 | 0 | 0 | 0 | 0 | 2 |
| TQLLLGSLE (SEQ ID NO: 150) | 0 | 0 | 0 | 0 | 0 | 2 |
| TQLILGALE (SEQ ID NO: 151) | 0 | 0 | 0 | 0 | 0 | 2 |
| TQLILGSLE (SEQ ID NO: 152) | 0 | 0 | 0 | 0 | 0 | 2 |
| TQILLGALE (SEQ ID NO: 153) | 0 | 0 | 0 | 0 | 0 | 2 |
| TQILLGSLE (SEQ ID NO: 154) | 0 | 0 | 0 | 0 | 0 | 2 |
| TQIILGALE (SEQ ID NO: 155) | 0 | 0 | 0 | 0 | 0 | 2 |
| TQIILGSLE (SEQ ID NO: 156) | 0 | 0 | 0 | 0 | 0 | 2 |
| TQVLLGALE (SEQ ID NO: 157) | 0 | 0 | 0 | 0 | 0 | 2 |
| TQVLLGSLE (SEQ ID NO: 158) | 0 | 0 | 0 | 0 | 0 | 2 |
| TQVILGALE (SEQ ID NO: 159) | 0 | 0 | 0 | 0 | 0 | 2 |
| TQVILGSLE (SEQ ID NO: 160) | 0 | 0 | 0 | 0 | 0 | 2 |

[0155] Finally, less immunogenic sequences were identified for the residue 135-143 epitope. These sequences conserve the identity of several residues that have been implicated in TPO function: R136, K138, and R140. The wild-type sequence and matrix method scores are shown in the top row of data for reference. These sequences eliminate all hits in the 135-143 epitope and also eliminate many of the hits in the overlapping epitopes. The wild-type sequence and matrix scores are shown in the top row of data for reference.

| sequence | anchor | anchor | anchor | overlap | overlap | overlap |
|---|---|---|---|---|---|---|
| at residues 135-143 | 1% | 3% | 5% | 1% | 3% | 5% |
| LRGKVRFLM (SEQ ID NO: 2) | 17 | 18 | 21 | 0 | 15 | 46 |
| ARGKVKHLL (SEQ ID NO: 161) | 0 | 0 | 0 | 0 | 7 | 16 |
| ARGKVKLLL (SEQ ID NO: 162) | 0 | 0 | 0 | 0 | 7 | 17 |
| ARGKVKHLM (SEQ ID NO: 163) | 0 | 0 | 0 | 0 | 7 | 18 |
| ARGKVKLLM (SEQ ID NO: 164) | 0 | 0 | 0 | 0 | 7 | 19 |
| ARGKVRHLL (SEQ ID NO: 165) | 0 | 0 | 0 | 0 | 7 | 20 |
| ARGKVKFLQ (SEQ ID NO: 166) | 0 | 0 | 0 | 0 | 7 | 20 |
| ARGKVKHLQ (SEQ ID NO: 167) | 0 | 0 | 0 | 0 | 7 | 20 |
| ARGKVKLLQ (SEQ ID NO: 168) | 0 | 0 | 0 | 0 | 7 | 20 |
| ARGKVKYLQ (SEQ ID NO: 169) | 0 | 0 | 0 | 0 | 7 | 20 |
| ARGKVRHLM (SEQ ID NO: 170) | 0 | 0 | 0 | 0 | 7 | 22 |
| ARGKVRHLQ (SEQ ID NO: 171) | 0 | 0 | 0 | 0 | 7 | 24 |
| ARGKVKFLL (SEQ ID NO: 172) | 0 | 0 | 0 | 0 | 8 | 17 |
| ARGKVKYLL (SEQ ID NO: 173) | 0 | 0 | 0 | 0 | 8 | 17 |
| ARGKVKFLM (SEQ ID NO: 174) | 0 | 0 | 0 | 0 | 8 | 22 |
| ARGKVKYLM (SEQ ID NO: 175) | 0 | 0 | 0 | 0 | 8 | 22 |
| ARGKVRFLQ (SEQ ID NO: 176) | 0 | 0 | 0 | 0 | 12 | 41 |
| ARGKVRYLQ (SEQ ID NO: 177) | 0 | 0 | 0 | 0 | 12 | 41 |
| ARGKVRFLL (SEQ ID NO: 178) | 0 | 0 | 0 | 0 | 13 | 38 |
| ARGKVRYLL (SEQ ID NO: 179) | 0 | 0 | 0 | 0 | 13 | 38 |
| ARGKVRFLM (SEQ ID NO: 180) | 0 | 0 | 0 | 0 | 13 | 43 |
| ARGKVRYLM (SEQ ID NO: 181) | 0 | 0 | 0 | 0 | 13 | 43 |

[0156] It is also possible to identify sequences with reduced immunogenicity that maintain the hydrophobicity of the anchor position, L135. The wild-type sequence and matrix scores are shown in the top row of data for reference.

| sequence | anchor | anchor | anchor | overlap | overlap | overlap |
|---|---|---|---|---|---|---|
| at residues 135-143 | 1% | 3% | 5% | 1% | 3% | 5% |
| LRGKVRFLM (SEQ ID NO: 2) | 17 | 18 | 21 | 0 | 15 | 46 |
| LRGKVKYLL (SEQ ID NO: 182) | 2 | 17 | 17 | 0 | 10 | 19 |
| IRGKVKYLL (SEQ ID NO: 183) | 2 | 17 | 17 | 0 | 10 | 19 |
| VRGKVKYLL (SEQ ID NO: 184) | 2 | 17 | 17 | 0 | 12 | 22 |
| FRGKVRYLL (SEQ ID NO: 185) | 6 | 10 | 13 | 0 | 13 | 39 |
| FRGKVRHLL (SEQ ID NO: 186) | 8 | 11 | 18 | 0 | 7 | 21 |
| LRGKVKHLL (SEQ ID NO: 187) | 10 | 17 | 17 | 0 | 9 | 18 |
| IRGKVKHLL (SEQ ID NO: 188) | 10 | 17 | 17 | 0 | 9 | 18 |
| VRGKVKHLL (SEQ ID NO: 189) | 10 | 17 | 17 | 0 | 11 | 21 |
| LRGKVKFLL (SEQ ID NO: 190) | 14 | 17 | 17 | 0 | 10 | 19 |
| IRGKVKFLL (SEQ ID NO: 191) | 14 | 17 | 17 | 0 | 10 | 19 |
| VRGKVKFLL (SEQ ID NO: 192) | 14 | 17 | 17 | 0 | 12 | 22 |

[0157]

| sequence | anchor | anchor | anchor | overlap | overlap | overlap |
|---|---|---|---|---|---|---|
| at residues 135-143 | 1% | 3% | 5% | 1% | 3% | 5% |
| LRGKVRFLM (SEQ ID NO: 2) | 17 | 18 | 21 | 0 | 15 | 46 |
| LRGKVRFLN (SEQ ID NO: 193) | 3 | 17 | 17 | 0 | 14 | 39 |
| LRGKVRDLM (SEQ ID NO: 194) | 0 | 6 | 14 | 0 | 9 | 21 |
| LRGKVRDLN (SEQ ID NO: 195) | 0 | 1 | 3 | 0 | 9 | 18 |
| LRGKVRDLL (SEQ ID NO: 196) | 0 | 0 | 3 | 0 | 9 | 19 |
| LRGKVRTLM (SEQ ID NO: 197) | 4 | 13 | 18 | 0 | 9 | 24 |
| LRGKVRTLN (SEQ ID NO: 198) | 0 | 4 | 5 | 0 | 9 | 21 |
| LRGKVRTLL (SEQ ID NO: 199) | 1 | 1 | 10 | 0 | 9 | 22 |
| LRGKVRQLM (SEQ ID NO: 200) | 10 | 17 | 18 | 0 | 9 | 24 |
| LRGKVRQLN (SEQ ID NO: 201) | 3 | 6 | 13 | 0 | 9 | 21 |
| LRGKVRQLL (SEQ ID NO: 202) | 1 | 12 | 15 | 0 | 9 | 22 |
| LRDKVRDLM (SEQ ID NO: 203) | 0 | 0 | 0 | 0 | 12 | 22 |
| LRDKVRDLN (SEQ ID NO: 204) | 0 | 0 | 0 | 0 | 12 | 19 |
| LRDKVRDLL (SEQ ID NO: 205) | 0 | 0 | 0 | 0 | 12 | 20 |
| LRDKVRTLM (SEQ ID NO: 206) | 0 | 1 | 1 | 0 | 12 | 25 |
| LRDKVRTLN (SEQ ID NO: 207) | 0 | 0 | 0 | 0 | 12 | 22 |
| LRDKVRTLL (SEQ ID NO: 208) | 0 | 0 | 1 | 0 | 12 | 23 |
| LRDKVRQLM (SEQ ID NO: 209) | 0 | 1 | 7 | 0 | 12 | 25 |
| LRDKVRQLN (SEQ ID NO: 210) | 0 | 1 | 2 | 0 | 12 | 22 |
| LRDKVRQLL (SEQ ID NO: 211) | 0 | 0 | 0 | 0 | 12 | 23 |

[0158] Additional sequences with reduced immunogenicity were identified that conserve L135 and retain positively charged residues at positions 136, 138, and 140.

| sequence | anchor | anchor | anchor | overlap | overlap | overlap |
|---|---|---|---|---|---|---|
| at residues 135-143 | 1% | 3% | 5% | 1% | 3% | 5% |
| LRGKVRFLM (SEQ ID NO:2) | 17 | 18 | 21 | 0 | 15 | 46 |
| LKGKVRKLL (SEQ ID NO:212) | 0 | 2 | 4 | 1 | 7 | 17 |
| LKGKVRQLL (SEQ ID NO:213) | 0 | 0 | 2 | 1 | 7 | 17 |
| LKGKVRYLL (SEQ ID NO:214) | 0 | 0 | 2 | 1 | 9 | 21 |
| LKGKVKQLL (SEQ ID NO:215) | 0 | 1 | 4 | 1 | 7 | 16 |
| LKAKVRKLL (SEQ ID NO:216) | 0 | 1 | 3 | 1 | 13 | 31 |
| LKAKVRQLL (SEQ ID NO:217) | 0 | 0 | 1 | 1 | 13 | 31 |
| LKAKVRYLL (SEQ ID NO:218) | 0 | 0 | 2 | 1 | 15 | 35 |
| LKAKVKQLL (SEQ ID NO:219) | 0 | 0 | 3 | 1 | 13 | 22 |
| LKAKVKYLL (SEQ ID NO:220) | 0 | 1 | 4 | 1 | 13 | 23 |

[0159] To obtain a greater reduction in predicted immunogenicity, mutations in residues 135-143 were combined with mutations in residues 127-134 and/or residues 144-151. The wild-type sequence and matrix method scores are shown in the top row of data for each reference.

| sequence | anchor | anchor | anchor | overlap | overlap | overlap |
|---|---|---|---|---|---|---|
| at residues 129-145 | 1% | 3% | 5% | 1% | 3% | 5% |
| LSFQHLLRGKVRFLMLV (SEQ ID NO:2) | 17 | 18 | 21 | 0 | 23 | 57 |
| ESFEHLLKGKVRQLLEA (SEQ ID NO:221) | 0 | 0 | 2 | 0 | 0 | 1 |
| ESFEHLLKGKVRYLLEA (SEQ ID NO:222) | 0 | 0 | 2 | 0 | 0 | 1 |
| ESFEHLARGKVRYLMEA (SEQ ID NO:223) | 0 | 0 | 0 | 0 | 0 | 1 |
| ESFEHLARGKVKFLMEA (SEQ ID NO:224) | 0 | 0 | 0 | 0 | 0 | 1 |

### Example 3

### Homology Modeling of TPO

[0160] A model of the three-dimensional structure of TPO was generated using the Homology module in the computer program InsightII. The crystal structure of erythropoietin (PDB code 1 EER, Syed et. al. Nature 395:511 (1998)) and the sequence of TPO shown in FIG. 1 were used to produce the homology model. As TPO and EPO share limited sequence similarity, the correct alignment between the two sequences is somewhat ambiguous. A number of possible alignments were tested, and the sequence alignment shown in FIG. 2 was observed to produce the highest quality models.

### Example 4

### Identification of Structured, Less Immunogenic TPO Variants

[0161] PDA® calculations were performed to predict the energies of each of the less immunogenic variants of the major epitopes in TPO, as well as the native sequence. The energies of the native sequences were then compared with the energies of the variants to determine which of the less immunogenic TPO sequences are compatible with maintaining the structure and function of TPO. Each calculation used one or more of the homology models produced above as the template. Unless otherwise noted, the nine residues comprising an epitope of interest were determined to be the variable residue positions. A variety of rotameric states were considered for each variable position, and the sequence was constrained to be the sequence of a specific less immunogenic variant identified previously. Rotamer-template and rotamer-rotamer energies were then calculated using a force field including terms describing van der Waals interactions, hydrogen bonds, electrostatics, and solvation. The optimal rotameric configurations for each sequence were determined using DEE as a combinatorial optimization method.

[0162] In general, all of the sequences whose energies are similar to or better than (that is, less than) the energy of the native sequence are likely to be structured. Sequences that conserve those residues that are known to be important for function are likely to also be active. Alternatively, it is possible to model the interaction of TPO with mpl receptor and then to determine which variant sequences are compatible with forming this interaction.

[0163] Shown below is the calculated immunogenicity and energy of the native sequence and several less immunogenic variants of epitope 1 (residues 9-17). Energies were calculated using two different homology models; although the exact values vary the overall trends are fairly consistent.

| sequence | | | | | | | 5_2 | 8_2 |
|---|---|---|---|---|---|---|---|---|
| at residues 9-17 | a1% | a3% | a5% | o1% | o3% | o5% | energy | energy |
| LRVLSKLLR (SEQ ID NO:2) | 17 | 31 | 36 | 18 | 33 | 45 | 22.25 | 212.08 |
| KRVLSKLLK (SEQ ID NO:225) | 0 | 0 | 0 | 0 | 15 | 25 | 17.32 | 209.67 |
| KRVLSKLLQ (SEQ ID NO:226) | 0 | 0 | 0 | 0 | 11 | 21 | 16.86 | 206.04 |
| ARALSKALE (SEQ ID NO:43) | 0 | 0 | 0 | 0 | 0 | 0 | −12.16 | −7.53 |
| ARALSKALS (SEQ ID NO:44) | 0 | 0 | 0 | 0 | 0 | 0 | −10.62 | −7.28 |
| ARALSKVLE (SEQ ID NO:47) | 0 | 0 | 0 | 0 | 0 | 0 | −13.19 | −1.84 |
| ARALSRALS (SEQ ID NO:50) | 0 | 0 | 0 | 0 | 0 | 0 | −12.77 | −8.02 |
| ARALSRVLE (SEQ ID NO:53) | 0 | 0 | 0 | 0 | 0 | 0 | −14.98 | −3.03 |
| ARILSKALE (SEQ ID NO:63) | 0 | 0 | 0 | 0 | 0 | 1 | −13.81 | −8.47 |
| ARILSKVLE (SEQ ID NO:65) | 0 | 0 | 0 | 0 | 0 | 1 | −14.48 | −2.95 |
| ARILSRALE (SEQ ID NO:67) | 0 | 0 | 0 | 0 | 0 | 1 | −15.08 | −10.52 |
| ARILSRLLE (SEQ ID NO:66) | 0 | 0 | 0 | 0 | 0 | 1 | 20.09 | 211.32 |
| ARILSRVLE (SEQ ID NO:69) | 0 | 0 | 0 | 0 | 0 | 1 | −15.75 | −5.02 |
| ARVLSKALE (SEQ ID NO:55) | 0 | 0 | 0 | 0 | 0 | 1 | −14.41 | −8.87 |
| ARVLSKLLE (SEQ ID NO:54) | 0 | 0 | 0 | 0 | 0 | 1 | 20.82 | 212.96 |
| ARVLSKVLE (SEQ ID NO:57) | 0 | 0 | 0 | 0 | 0 | 1 | −15.11 | −3.38 |
| ARVLSRALE (SEQ ID NO:59) | 0 | 0 | 0 | 0 | 0 | 1 | −15.68 | −11.34 |
| ARVLSRVLE (SEQ ID NO:61) | 0 | 0 | 0 | 0 | 0 | 1 | −16.38 | −5.85 |

[0164] Shown below is the calculated immunogenicity and energy of the native sequence and several less immunogenic variants of epitope 2 (residues 135-143). Energies were calculated using two different homology models; although the exact values vary the overall trends are fairly consistent. In calculations for the last group of variants, residues 129, 132, and 135-145 were all treated as variable positions.

| | | | | | | 5_2 | 8_1 |
|---|---|---|---|---|---|---|---|
| a1% | a3% | a5% | o1% | o3% | o5% | energy | energy |

Sequence at residues 135-143

| | | | | | | | | |
|---|---|---|---|---|---|---|---|---|
| LRGKVRFLM (SEQ ID NO:2) | 17 | 18 | 21 | 0 | 15 | 46 | −84.72 | −88.95 |
| LKGKVRYLL (SEQ ID NO:214) | 0 | 0 | 2 | 1 | 14 | 41 | −83.52 | −87.19 |
| LKGKVRQLL (SEQ ID NO:213) | 0 | 0 | 2 | 1 | 8 | 22 | −81.62 | −85.05 |
| LKGKLRYLL (SEQ ID NO:227) | 0 | 0 | 2 | 0 | 14 | 41 | −85.41 | −79.90 |
| LKGKLRQLL (SEQ ID NO:228) | 0 | 0 | 2 | 0 | 8 | 22 | −83.66 | −77.51 |
| ARGKVRYLM (SEQ ID NO:281) | 0 | 0 | 0 | 0 | 13 | 43 | −75.61 | −79.56 |
| ARGKVKFLM (SEQ ID NO:174) | 0 | 0 | 0 | 0 | 8 | 22 | −80.59 | −81.54 |
| ARGKVKFLL (SEQ ID NO:172) | 0 | 0 | 0 | 0 | 8 | 17 | −79.54 | −79.06 |
| ARGKVKHLM (SEQ ID NO:163) | 0 | 0 | 0 | 0 | 7 | 18 | −76.79 | −79.55 |
| ARGKVKLLM (SEQ ID NO:164) | 0 | 0 | 0 | 0 | 7 | 19 | −83.70 | −82.41 |
| ARGKVKLLL (SEQ ID NO:162) | 0 | 0 | 0 | 0 | 7 | 17 | −82.65 | −79.94 |
| ARGKVKYLM (SEQ ID NO:175) | 0 | 0 | 0 | 0 | 8 | 22 | −83.26 | −83.42 |
| ARGKVKYLL (SEQ ID NO:173) | 0 | 0 | 0 | 0 | 8 | 17 | −82.21 | −80.94 |

Sequence at residues 129-145

| | | | | | | | | |
|---|---|---|---|---|---|---|---|---|
| LSFQHLLRGKVRFLMLV (SEQ ID NO:2) | 17 | 18 | 21 | 0 | 23 | 57 | −89.13 | 37.40 |
| ESFEHLLRGKVRFLMLV (SEQ ID NO:229) | 17 | 18 | 21 | 0 | 15 | 44 | −103.33 | −45.78 |
| LSFQHLLRGKVRFLMEA (SEQ ID NO:230) | 17 | 18 | 21 | 0 | 8 | 15 | −90.88 | 38.74 |
| ESFEHLLKGKVRQLLEA (SEQ ID NO:221) | 0 | 0 | 2 | 0 | 0 | 1 | −102.01 | −40.98 |
| ESFEHLLKGKVRYLLEA (SEQ ID NO:222) | 0 | 0 | 2 | 0 | 0 | 1 | −104.90 | −42.21 |
| ESFEHLARGKVRYLMEA (SEQ ID NO:223) | 0 | 0 | 0 | 0 | 0 | 1 | −95.81 | −35.14 |
| ESFEHLARGKVKFLMEA (SEQ ID NO:224) | 0 | 0 | 0 | 0 | 0 | 1 | −94.75 | −35.21 |

[0165] Shown below is the calculated immunogenicity and energy of the native sequence and several less immunogenic variants of epitope 3 (residues 69-77). Energies were calculated using two different homology models; although the exact values vary the overall trends are fairly consistent.

| sequence | | | | | | | 5_2 | 8_1 |
|---|---|---|---|---|---|---|---|---|
| at residues 69-77 | a1% | a3% | a5% | o1% | o3% | o5% | energy | energy |
| LLLEGVMAA (SEQ ID NO:2) | 2 | 8 | 14 | 0 | 3 | 10 | −56.87 | −59.30 |
| LLLEGLMAA (SEQ ID NO:231) | 0 | 0 | 2 | 0 | 3 | 10 | −52.91 | −61.31 |
| LLLEGVKAA (SEQ ID NO:232) | 0 | 2 | 3 | 0 | 3 | 10 | −55.73 | −61.60 |
| LLLEGVQAA (SEQ ID NO:233) | 0 | 2 | 3 | 0 | 3 | 10 | −57.02 | −61.18 |
| LLLEGAMAA (SEQ ID NO:234) | 0 | 2 | 4 | 0 | 3 | 10 | −49.09 | −51.72 |
| ALLEGVLAA (SEQ ID NO:81) | 0 | 0 | 0 | 0 | 0 | 1 | −55.66 | −52.58 |
| ALLEGVQAA (SEQ ID NO:82) | 0 | 0 | 0 | 0 | 0 | 1 | −54.73 | −54.20 |
| ALLEGVMAA (SEQ ID NO:79) | 0 | 0 | 0 | 0 | 0 | 1 | −54.58 | −52.54 |
| QLLEGVQAA (SEQ ID NO:94) | 0 | 0 | 0 | 0 | 1 | 1 | −54.41 | −56.74 |
| QLLEGVMAA (SEQ ID NO:91) | 0 | 0 | 0 | 0 | 1 | 1 | −54.27 | −54.95 |
| ALLEGVKAA (SEQ ID NO:80) | 0 | 0 | 0 | 0 | 0 | 1 | −53.44 | −54.77 |
| QLLEGVKAA (SEQ ID NO:92) | 0 | 0 | 0 | 0 | 1 | 1 | −53.07 | −57.17 |
| QLLKGVLAA (SEQ ID NO:105) | 0 | 0 | 0 | 0 | 1 | 1 | −52.61 | −55.71 |
| QLLKGVMAA (SEQ ID NO:103) | 0 | 0 | 0 | 0 | 1 | 1 | −52.00 | −55.55 |
| ALLEGLLAA (SEQ ID NO:89) | 0 | 0 | 0 | 0 | 0 | 1 | −51.78 | −54.66 |
| ALLEGLQAA (SEQ ID NO:90) | 0 | 0 | 0 | 0 | 0 | 1 | −50.74 | −56.24 |
| QLLKGVKAA (SEQ ID NO:104) | 0 | 0 | 0 | 0 | 1 | 1 | −50.73 | −56.14 |
| ALLEGLMAA (SEQ ID NO:87) | 0 | 0 | 0 | 0 | 0 | 1 | −50.62 | −54.56 |
| QLLEGLMAA (SEQ ID NO:99) | 0 | 0 | 0 | 0 | 1 | 1 | −50.31 | −56.96 |

[0166] Shown below is the calculated immunogenicity and energy of the native sequence and several less immunogenic variants of epitope 4 (residues 97-105). Energies were calculated using two different homology models; although the exact values vary the overall trends are fairly consistent.

| sequence | | | | | | | 5_2 | 8_1 |
|---|---|---|---|---|---|---|---|---|
| at residues 97-105 | a1% | a3% | a5% | o1% | o3% | o5% | energy | energy |
| VRLLLGALQ (SEQ ID NO:2) | 6 | 25 | 32 | 1 | 2 | 5 | −71.58 | −63.96 |
| TKILLGSLE (SEQ ID NO:142) | 0 | 0 | 0 | 0 | 0 | 4 | −66.25 | −60.24 |
| TKLLLGSLE (SEQ ID NO:138) | 0 | 0 | 0 | 0 | 0 | 4 | −65.64 | −60.07 |
| TKVLLGSLE (SEQ ID NO:146) | 0 | 0 | 0 | 0 | 0 | 4 | −66.61 | −60.03 |
| TRILLGSLE (SEQ ID NO:130) | 0 | 0 | 0 | 0 | 0 | 4 | −66.10 | −63.39 |
| TRLLLGSLE (SEQ ID NO:126) | 0 | 0 | 0 | 0 | 0 | 4 | −66.10 | −64.57 |
| TRLLLGSLQ (SEQ ID NO:235) | 0 | 0 | 0 | 1 | 2 | 5 | −68.59 | −60.87 |
| TRVLLGSLE (SEQ ID NO:134) | 0 | 0 | 0 | 0 | 0 | 4 | −67.29 | −64.65 |
| VKLILGALE (SEQ ID NO:109) | 0 | 0 | 0 | 0 | 0 | 4 | −65.45 | −64.31 |
| VKLILGALQ (SEQ ID NO:236) | 0 | 1 | 4 | 1 | 2 | 5 | −67.91 | −60.62 |
| VKVILGALE (SEQ ID NO:112) | 0 | 0 | 0 | 0 | 0 | 4 | −65.48 | −63.87 |
| VKVILGSLE (SEQ ID NO:113) | 0 | 0 | 0 | 0 | 0 | 4 | −69.69 | −63.87 |
| VKVLLGALE (SEQ ID NO:110) | 0 | 0 | 0 | 0 | 0 | 4 | −69.17 | −62.15 |
| VKVLLGSLE (SEQ ID NO:111) | 0 | 0 | 0 | 0 | 0 | 4 | −73.35 | −66.03 |
| VQVLLGALE (SEQ ID NO:114) | 0 | 0 | 0 | 0 | 0 | 2 | −67.72 | −62.42 |
| VQVLLGALQ (SEQ ID NO:237) | 0 | 1 | 4 | 1 | 2 | 3 | −70.37 | −58.84 |
| VQVLLGSLE (SEQ ID NO:115) | 0 | 0 | 0 | 0 | 0 | 2 | −71.90 | −66.30 |

### Example 5

### Activity of Reduced-Immunogenicity TPO Variants

[0167] Activity of the variant TPO molecules was determined by assaying a TPO-sensitive cell line for proliferation.

[0168] In a preferred embodiment, activity of the variant TPO molecules is determined in another cell line, such as the mouse IL-3 dependent BaF3, which has been engineered to express the human TPO receptor (See Bartley T D, Bogenberger J, Hunt P et al. Identification and cloning of a megakaryocyte growth and development factor (MGDF) that is a ligand for the cytokine receptor Mpl. Cell. 1994; 77:1117-1124; Duffy, et. al, Hydrazinonaphthalene and Azonaphthalene Thrombopoietin Mimics Are Nonpeptidyl Promoters of Megakaryocytopoiesis, J. Med. Chem. 2001, 44, 3730-3745; and de Sauvage F J, et al. Stimulation of megakaryocytopoiesis and thrombopoiesis by the c-Mpl ligand. Nature. 1994 Jun. 16;369(6481): 533-8, herein expressly incorporated by reference.). BaF3 is a mouse hematopoietic cell line, which requires IL-3 for growth and survival. When the human TPO receptor is expressed in these cells, replacement of IL-3 with TPO results in a concentration dependent response, which correlates with the specific activity of the TPO molecule.

[0169] This response can be measured with a variety of methods well known in the art. A preferred method is to measure BaF3-TPOR viability in response to TPO using Cell TiterGlo™ luminescence assay (Promega Corp. technical bulletin no. 288). Upon removal of IL-3 from the BaF3 TPO R cells for a period of 16 hours, the cells are then exposed to a range of concentrations of variant TPO for 48 hours. In a preferred method, 500 BaF3 TPOR cells are used in a volume of 25 ul per well of a 384 well assay plate. Following the 48 hour TPO exposure, viability is measured by lysing the cells in an equal volume of an enzymatic light emitting solution (luciferase) lacking only ATP to complete the reaction. Since intracellular ATP levels are directly proportional to cell number, the lysed cells provide ATP to complete the reaction. Measuring luminescence then determines TPO activity in a dose dependent and saturable fashion. The luminescence data can be analyzed several ways but a preferred embodiment is to use a variable slope non-linear regression calculation (Hill equation —REF, Prism REF). From this analysis a common measure of activity is to report the effective concentration of TPO, which yields 50% of the total activity measured (EC50). This value is therefore inversely related to the specific activity of the variant TPO and in a preferred embodiment is normalized to the wild-type EC50 value.

[0170] The activity of variant TPO proteins with mutations in residues 9-17 and 135-143 are shown in the table below. The variants were selected to modify the residues that are predicted to contribute most to MHC-binding affinity.

| TPO variant | EC50 |
|---|---|
| wt TPO | 0.069 |
| R136K | 0.092 |
| K138T/R140E | 0.43 |
| K138N/R140E | 0.24 |
| R10E/K14E | 0.47 |
| R10E/K14D | 0.30 |
| R10T/K14D | 0.53 |

[0171] The activity of variant TPO proteins with mutations in residues 9-17 are shown in the table below. These variants were selected to have reduced immunogenicity and retain functionally important residues.

| TPO Variant | EC50 |
|---|---|
| L9K/R17K | 0.001072 |
| L9K/R17Q | 4.01E − 05 |
| L9A/V11A/L15A/R17E | 0.2798 |
| L9A/V11A/L15A/R17S | 0.3661 |
| L9A/V11A/K14R/L15A/R17S | 0.5091 |
| L9A/V11A/K14R/L15V/R17E | 5343 |
| L9A/V11I/L15A/R17E | 0.1086 |
| L9A/V11I/L15V/R17E | 0.007998 |
| L9A/V11I/K14R/R17E | 0.001251 |
| L9A/V11I/K14R/L15V/R17E | 0.02322 |
| L9A/L15A/R17E | 0.07736 |
| L9A/R17E | 0.000888 |
| L9A/L15V/R17E | 0.03569 |
| L9A/K14R/L15A/R17E | 0.3481 |
| L9A/K14R/L15V/R17E | 0.07059 |
| L9A | 6.28E − 05 |
| V11A | 0.000741 |
| V11I | 0.3711 |
| K14R | 0.000187 |
| L15A | 0.001617 |
| L15V | 0.000208 |
| R17E | 0.001192 |
| R17K | 0.000133 |
| R17Q | 0.002625 |
| R17S | 0.001565 |
| wt TPO | 6.34E − 05 |

[0172] The activity of variant TPO proteins with mutations in residues 129-145 are shown in the table below. These variants were selected to have reduced immunogenicity and retain functionally important residues.

| TPO Variant | EC50 |
|---|---|
| R136K/F141Q/M143L | 0.001741 |
| R136K/V139L/F141Y/M143L | 0.002543 |
| R136K/V139L/F141Q/M143L | 0.007316 |
| L135A/F141Y | 0.02589 |
| L135A/R140K | 0.09264 |
| L135A/R140K/M143L | 0.2729 |
| L135A/R140K/F141H | 5727 |
| L135A/R140K/F141L | 2.644 |
| L135A/R140K/F141L/M143L | 4.728 |
| L135A/R140K/F141Y | 0.01831 |
| L135A/R140K/F141Y/M143L | 0.04429 |
| L144E/V145A | 0.000894 |
| L129E/Q132E/R136K/F141Q/M143L/L144E/V145A | 0.1847 |
| L129E/Q132E/R136K/F141Y/M143L/L144E/V145A | 0.001013 |
| L129E/Q132E/L135A/F141Y/L144E/V145A | 0.001192 |
| L129E/Q132E/L135A/R140A/L144E/V145A | 0.04887 |
| Q132E | 0.000166 |
| L135A | 0.01158 |
| R136K | 5.71E − 05 |
| V139L | 0.001059 |
| R140K | 0.07524 |
| F141H | 0.001178 |
| F141L | 0.001017 |
| F141Q | 0.004986 |
| F141Y | 0.001041 |
| M143L | 6.05E − 05 |
| L144E | 9.72E − 05 |
| WT TPO | 6.34E − 05 |

[0173] The activity of variant TPO proteins with mutations in residues 69-77 are shown in the table below. These variants were selected to have reduced immunogenicity and retain functionally important residues.

| TPO Variant | EC50 |
|---|---|
| V74L | 0.001338 |
| M75K | 4.10E − 05 |
| M75Q | 5.10E − 05 |
| V74A | 0.001527 |
| L69A/M75L | 0.000957 |
| L69A/M75Q | 8.32E − 14 |
| L69A | 0.001036 |
| L69Q/M75Q | 0.000123 |
| L69Q | 0.000111 |
| L69A/M75K | 9.93E − 05 |
| L69Q/M75K | 4.51E − 05 |
| L69Q/E72K/M75L | 0.000321 |
| L69Q/E72K | 5.41E − 05 |
| L69A/V74L/M75L | 0.004543 |
| L69Q/E72K/M75K | 0.000142 |
| L69A/V74L | 0.001608 |
| L69Q/V74L | 0.000154 |
| E72K | 0.001963 |
| M75L | 0.001049 |
| wt TPO | 6.34E − 05 |

[0174] The activity of variant TPO proteins with mutations in residues 97-105 are shown in the table below. These variants were selected to have reduced immunogenicity and retain functionally important residues.

| TPO Variant | EC50 |
|---|---|
| V97T/R98K/L99I/A103S/Q105E | 0.4953 |
| V97T/R98K/A103S/Q105E | 0.4469 |
| V97T/R98K/L99V/A103S/Q105E | 2.637 |
| V97T/L99I/A103S/Q105E | 0.4178 |
| V97T/A103S/Q105E | 0.8271 |
| V97T/A103S | 0.003357 |
| V97T/L99V/A103S/Q105E | 0.02027 |
| R98K/L100I/Q105E | 0.01138 |
| R98K/L100I | 0.005217 |
| R98K/L99V/L100I/Q105E | 0.09652 |
| R98K/L99V/L100I/A103S/Q105E | 0.06794 |
| R98K/L99V/Q105E | 0.002855 |
| R98K/L99V/A103S/Q105E | 0.001053 |
| R98Q/L99V/Q105E | 0.001117 |
| R98K/L99V | 0.000899 |
| R98Q/L99V/A103S/Q105E | 0.001249 |
| V97T | 2.081 |
| R98K | 0.00027 |
| R98Q | 7.52E − 05 |
| L99I | 0.000236 |
| L99V | 0.000524 |
| L100I | 0.001161 |
| A103S | 0.001222 |
| Q105E | 0.001001 |
| wt TPO | 6.34E − 05 |

The application's sequence listing, which the Patent Office published only in electronic form, follows.

SEQUENCE LISTING (237 sequences)

SEQ ID NO: 1 - protein, 163 aa, Homo sapiens
SPAPPACDLRVLSKLLRDSHVLHSRLSQCPEVHPLPTPVLLPAVDFSLGEWKTQMEETKAQDILGAVTLLLEGVMAARGQLGPTCLSSLLGQLSGQVRLLLGALQSLLGTQLPPQGRTTAHKDPNAIFLSFQHLLRGKVRFLMLVGGSTLCVRRAPPTTAVPS

SEQ ID NO: 2 - protein, 332 aa, Homo sapiens
SPAPPACDLRVLSKLLRDSHVLHSRLSQCPEVHPLPTPVLLPAVDFSLGEWKTQMEETKAQDILGAVTLLLEGVMAARGQLGPTCLSSLLGQLSGQVRLLLGALQSLLGTQLPPQGRTTAHKDPNAIFLSFQHLLRGKVRFLMLVGGSTLCVRRAPPTTAVPSRTSLVLTLNELPNRTSGLLETNFTASARTTGSGLLKWQQGFRAKIPGLLNQTSRSLDQIPGYLNRIHELLNGTRGLFPGPSRRTLGAPDISSGTSDTGSLPPNLQPGYSPSPTHPPTGQYTLFPLPPTLPTPVVQLHPLLPDPSAPTPTPTSPLLNTSYTHSQNLSQEG

SEQ ID NO: 3 - protein, 166 aa, Homo sapiens
APPRLICDSRVLERYLLEAKEAEKITTGCAEHCSLNEKITVPDTKVNFYAWKRMEVGQQAVEVWQGLALLSEAVLRGQALLVKSSQPWEPLQLHVDKAVSGLRSLTTLLRALGAQKEAISNSDAASAAPLRTITADTFRKLFRVYSNFLRGKLKLYTGEACRTGDR

SEQ ID NO: 4 - protein, 332 aa, Artificial sequence
  Synthetic
SPAPPACDSRVLSKLLRDSHVLHSRLSQCPEVHPLPTPVLLPAVDFSLGEWKTQMEETKAQDILGAVTLLLEGVMAARGQLGPTCLSSLLGQLSGQVRLLLGALQSLLGTQLPPQGRTTAHKDPNAIFLSFQHLLRGKVRFLMLVGGSTLCVRRAPPTTAVPSRTSLVLTLNELPNRTSGLLETNFTASARTTGSGLLKWQQGFRAKIPGLLNQTSRSLDQIPGYLNRIHELLNGTRGLFPGPSRRTLGAPDISSGTSDTGSLPPNLQPGYSPSPTHPPTGQYTLFPLPPTLPTPVVQLHPLLPDPSAPTPTPTSPLLNTSYTHSQNLSQEG

SEQ ID NO: 5 - protein, 332 aa, Artificial sequence
  Synthetic
SPAPPACDKRVLSKLLRDSHVLHSRLSQCPEVHPLPTPVLLPAVDFSLGEWKTQMEETKAQDILGAVTLLLEGVMAARGQLGPTCLSSLLGQLSGQVRLLLGALQSLLGTQLPPQGRTTAHKDPNAIFLSFQHLLRGKVRFLMLVGGSTLCVRRAPPTTAVPSRTSLVLTLNELPNRTSGLLETNFTASARTTGSGLLKWQQGFRAKIPGLLNQTSRSLDQIPGYLNRIHELLNGTRGLFPGPSRRTLGAPDISSGTSDTGSLPPNLQPGYSPSPTHPPTGQYTLFPLPPTLPTPVVQLHPLLPDPSAPTPTPTSPLLNTSYTHSQNLSQEG

SEQ ID NO: 6 - protein, 332 aa, Artificial sequence
  Synthetic
SPAPPACDRRVLSKLLRDSHVLHSRLSQCPEVHPLPTPVLLPAVDFSLGEWKTQMEETKAQDILGAVTLLLEGVMAARGQLGPTCLSSLLGQLSGQVRLLLGALQSLLGTQLPPQGRTTAHKDPNAIFLSFQHLLRGKVRFLMLVGGSTLCVRRAPPTTAVPSRTSLVLTLNELPNRTSGLLETNFTASARTTGSGLLKWQQGFRAKIPGLLNQTSRSLDQIPGYLNRIHELLNGTRGLFPGPSRRTLGAPDISSGTSDTGSLPPNLQPGYSPSPTHPPTGQYTLFPLPPTLPTPVVQLHPLLPDPSAPTPTPTSPLLNTSYTHSQNLSQEG

SEQ ID NO: 7 - protein, 332 aa, Artificial sequence
  Synthetic
SPAPPACDERVLSKLLRDSHVLHSRLSQCPEVHPLPTPVLLPAVDFSLGEWKTQMEETKAQDILGAVTLLLEGVMAARGQLGPTCLSSLLGQLSGQVRLLLGALQSLLGTQLPPQGRTTAHKDPNAIFLSFQHLLRGKVRFLMLVGGSTLCVRRAPPTTAVPSRTSLVLTLNELPNRTSGLLETNFTASARTTGSGLLKWQQGFRAKIPGLLNQTSRSLDQIPGYLNRIHELLNGTRGLFPGPSRRTLGAPDISSGTSDTGSLPPNLQPGYSPSPTHPPTGQYTLFPLPPTLPTPVVQLHPLLPDPSAPTPTPTSPLLNTSYTHSQNLSQEG

SEQ ID NO: 8 - protein, 332 aa, Artificial sequence
  Synthetic
SPAPPACDLDVLSKLLRDSHVLHSRLSQCPEVHPLPTPVLLPAVDFSLGEWKTQMEETKAQDILGAVTLLLEGVMAARGQLGPTCLSSLLGQLSGQVRLLLGALQSLLGTQLPPQGRTTAHKDPNAIFLSFQHLLRGKVRFLMLVGGSTLCVRRAPPTTAVPSRTSLVLTLNELPNRTSGLLETNFTASARTTGSGLLKWQQGFRAKIPGLLNQTSRSLDQIPGYLNRIHELLNGTRGLFPGPSRRTLGAPDISSGTSDTGSLPPNLQPGYSPSPTHPPTGQYTLFPLPPTLPTPVVQLHPLLPDPSAPTPTPTSPLLNTSYTHSQNLSQEG

SEQ ID NO: 9 - protein, 332 aa, Artificial sequence
  Synthetic
SPAPPACDLEVLSKLLRDSHVLHSRLSQCPEVHPLPTPVLLPAVDFSLGEWKTQMEETKAQDILGAVTLLLEGVMAARGQLGPTCLSSLLGQLSGQVRLLLGALQSLLGTQLPPQGRTTAHKDPNAIFLSFQHLLRGKVRFLMLVGGSTLCVRRAPPTTAVPSRTSLVLTLNELPNRTSGLLETNFTASARTTGSGLLKWQQGFRAKIPGLLNQTSRSLDQIPGYLNRIHELLNGTRGLFPGPSRRTLGAPDISSGTSDTGSLPPNLQPGYSPSPTHPPTGQYTLFPLPPTLPTPVVQLHPLLPDPSAPTPTPTSPLLNTSYTHSQNLSQEG

SEQ ID NO: 10 - protein, 332 aa, Artificial sequence
  Synthetic
SPAPPACDLSVLSKLLRDSHVLHSRLSQCPEVHPLPTPVLLPAVDFSLGEWKTQMEETKAQDILGAVTLLLEGVMAARGQLGPTCLSSLLGQLSGQVRLLLGALQSLLGTQLPPQGRTTAHKDPNAIFLSFQHLLRGKVRFLMLVGGSTLCVRRAPPTTAVPSRTSLVLTLNELPNRTSGLLETNFTASARTTGSGLLKWQQGFRAKIPGLLNQTSRSLDQIPGYLNRIHELLNGTRGLFPGPSRRTLGAPDISSGTSDTGSLPPNLQPGYSPSPTHPPTGQYTLFPLPPTLPTPVVQLHPLLPDPSAPTPTPTSPLLNTSYTHSQNLSQEG

SEQ ID NO: 11 - protein, 332 aa, Artificial sequence
  Synthetic
SPAPPACDLTVLSKLLRDSHVLHSRLSQCPEVHPLPTPVLLPAVDFSLGEWKTQMEETKAQDILGAVTLLLEGVMAARGQLGPTCLSSLLGQLSGQVRLLLGALQSLLGTQLPPQGRTTAHKDPNAIFLSFQHLLRGKVRFLMLVGGSTLCVRRAPPTTAVPSRTSLVLTLNELPNRTSGLLETNFTASARTTGSGLLKWQQGFRAKIPGLLNQTSRSLDQIPGYLNRIHELLNGTRGLFPGPSRRTLGAPDISSGTSDTGSLPPNLQPGYSPSPTHPPTGQYTLFPLPPTLPTPVVQLHPLLPDPSAPTPTPTSPLLNTSYTHSQNLSQEG

SEQ ID NO: 12 - protein, 332 aa, Artificial sequence
  Synthetic
SPAPPACDLRVLSELLRDSHVLHSRLSQCPEVHPLPTPVLLPAVDFSLGEWKTQMEETKAQDILGAVTLLLEGVMAARGQLGPTCLSSLLGQLSGQVRLLLGALQSLLGTQLPPQGRTTAHKDPNAIFLSFQHLLRGKVRFLMLVGGSTLCVRRAPPTTAVPSRTSLVLTLNELPNRTSGLLETNFTASARTTGSGLLKWQQGFRAKIPGLLNQTSRSLDQIPGYLNRIHELLNGTRGLFPGPSRRTLGAPDISSGTSDTGSLPPNLQPGYSPSPTHPPTGQYTLFPLPPTLPTPVVQLHPLLPDPSAPTPTPTSPLLNTSYTHSQNLSQEG

SEQ ID NO: 13 - protein, 332 aa, Artificial sequence
  Synthetic
SPAPPACDLRVLSDLLRDSHVLHSRLSQCPEVHPLPTPVLLPAVDFSLGEWKTQMEETKAQDILGAVTLLLEGVMAARGQLGPTCLSSLLGQLSGQVRLLLGALQSLLGTQLPPQGRTTAHKDPNAIFLSFQHLLRGKVRFLMLVGGSTLCVRRAPPTTAVPSRTSLVLTLNELPNRTSGLLETNFTASARTTGSGLLKWQQGFRAKIPGLLNQTSRSLDQIPGYLNRIHELLNGTRGLFPGPSRRTLGAPDISSGTSDTGSLPPNLQPGYSPSPTHPPTGQYTLFPLPPTLPTPVVQLHPLLPDPSAPTPTPTSPLLNTSYTHSQNLSQEG

SEQ ID NO: 14 - protein, 332 aa, Artificial sequence
  Synthetic
SPAPPACDLDVLSDLLRDSHVLHSRLSQCPEVHPLPTPVLLPAVDFSLGEWKTQMEETKAQDILGAVTLLLEGVMAARGQLGPTCLSSLLGQLSGQVRLLLGALQSLLGTQLPPQGRTTAHKDPNAIFLSFQHLLRGKVRFLMLVGGSTLCVRRAPPTTAVPSRTSLVLTLNELPNRTSGLLETNFTASARTTGSGLLKWQQGFRAKIPGLLNQTSRSLDQIPGYLNRIHELLNGTRGLFPGPSRRTLGAPDISSGTSDTGSLPPNLQPGYSPSPTHPPTGQYTLFPLPPTLPTPVVQLHPLLPDPSAPTPTPTSPLLNTSYTHSQNLSQEG

SEQ ID NO: 15 - protein, 332 aa, Artificial sequence
  Synthetic
SPAPPACDLDVLSELLRDSHVLHSRLSQCPEVHPLPTPVLLPAVDFSLGEWKTQMEETKAQDILGAVTLLLEGVMAARGQLGPTCLSSLLGQLSGQVRLLLGALQSLLGTQLPPQGRTTAHKDPNAIFLSFQHLLRGKVRFLMLVGGSTLCVRRAPPTTAVPSRTSLVLTLNELPNRTSGLLETNFTASARTTGSGLLKWQQGFRAKIPGLLNQTSRSLDQIPGYLNRIHELLNGTRGLFPGPSRRTLGAPDISSGTSDTGSLPPNLQPGYSPSPTHPPTGQYTLFPLPPTLPTPVVQLHPLLPDPSAPTPTPTSPLLNTSYTHSQNLSQEG

SEQ ID NO: 16 - protein, 332 aa, Artificial sequence
  Synthetic
SPAPPACDLDVLSRLLRDSHVLHSRLSQCPEVHPLPTPVLLPAVDFSLGEWKTQMEETKAQDILGAVTLLLEGVMAARGQLGPTCLSSLLGQLSGQVRLLLGALQSLLGTQLPPQGRTTAHKDPNAIFLSFQHLLRGKVRFLMLVGGSTLCVRRAPPTTAVPSRTSLVLTLNELPNRTSGLLETNFTASARTTGSGLLKWQQGFRAKIPGLLNQTSRSLDQIPGYLNRIHELLNGTRGLFPGPSRRTLGAPDISSGTSDTGSLPPNLQPGYSPSPTHPPTGQYTLFPLPPTLPTPVVQLHPLLPDPSAPTPTPTSPLLNTSYTHSQNLSQEG

SEQ ID NO: 17 - protein, 332 aa, Artificial sequence
  Synthetic
SPAPPACDLEVLSDLLRDSHVLHSRLSQCPEVHPLPTPVLLPAVDFSLGEWKTQMEETKAQDILGAVTLLLEGVMAARGQLGPTCLSSLLGQLSGQVRLLLGALQSLLGTQLPPQGRTTAHKDPNAIFLSFQHLLRGKVRFLMLVGGSTLCVRRAPPTTAVPSRTSLVLTLNELPNRTSGLLETNFTASARTTGSGLLKWQQGFRAKIPGLLNQTSRSLDQIPGYLNRIHELLNGTRGLFPGPSRRTLGAPDISSGTSDTGSLPPNLQPGYSPSPTHPPTGQYTLFPLPPTLPTPVVQLHPLLPDPSAPTPTPTSPLLNTSYTHSQNLSQEG

SEQ ID NO: 18 - protein, 332 aa, Artificial sequence
  Synthetic
SPAPPACDLEVLSELLRDSHVLHSRLSQCPEVHPLPTPVLLPAVDFSLGEWKTQMEETKAQDILGAVTLLLEGVMAARGQLGPTCLSSLLGQLSGQVRLLLGALQSLLGTQLPPQGRTTAHKDPNAIFLSFQHLLRGKVRFLMLVGGSTLCVRRAPPTTAVPSRTSLVLTLNELPNRTSGLLETNFTASARTTGSGLLKWQQGFRAKIPGLLNQTSRSLDQIPGYLNRIHELLNGTRGLFPGPSRRTLGAPDISSGTSDTGSLPPNLQPGYSPSPTHPPTGQYTLFPLPPTLPTPVVQLHPLLPDPSAPTPTPTSPLLNTSYTHSQNLSQEG

SEQ ID NO: 19 - protein, 332 aa, Artificial sequence
  Synthetic
SPAPPACDLEVLSRLLRDSHVLHSRLSQCPEVHPLPTPVLLPAVDFSLGEWKTQMEETKAQDILGAVTLLLEGVMAARGQLGPTCLSSLLGQLSGQVRLLLGALQSLLGTQLPPQGRTTAHKDPNAIFLSFQHLLRGKVRFLMLVGGSTLCVRRAPPTTAVPSRTSLVLTLNELPNRTSGLLETNFTASARTTGSGLLKWQQGFRAKIPGLLNQTSRSLDQIPGYLNRIHELLNGTRGLFPGPSRRTLGAPDISSGTSDTGSLPPNLQPGYSPSPTHPPTGQYTLFPLPPTLPTPVVQLHPLLPDPSAPTPTPTSPLLNTSYTHSQNLSQEG

SEQ ID NO: 20 - protein, 332 aa, Artificial sequence
  Synthetic
SPAPPACDLSVLSDLLRDSHVLHSRLSQCPEVHPLPTPVLLPAVDFSLGEWKTQMEETKAQDILGAVTLLLEGVMAARGQLGPTCLSSLLGQLSGQVRLLLGALQSLLGTQLPPQGRTTAHKDPNAIFLSFQHLLRGKVRFLMLVGGSTLCVRRAPPTTAVPSRTSLVLTLNELPNRTSGLLETNFTASARTTGSGLLKWQQGFRAKIPGLLNQTSRSLDQIPGYLNRIHELLNGTRGLFPGPSRRTLGAPDISSGTSDTGSLPPNLQPGYSPSPTHPPTGQYTLFPLPPTLPTPVVQLHPLLPDPSAPTPTPTSPLLNTSYTHSQNLSQEG

SEQ ID NO: 21 - protein, 332 aa, Artificial sequence
  Synthetic
SPAPPACDLSVLSELLRDSHVLHSRLSQCPEVHPLPTPVLLPAVDFSLGEWKTQMEETKAQDILGAVTLLLEGVMAARGQLGPTCLSSLLGQLSGQVRLLLGALQSLLGTQLPPQGRTTAHKDPNAIFLSFQHLLRGKVRFLMLVGGSTLCVRRAPPTTAVPSRTSLVLTLNELPNRTSGLLETNFTASARTTGSGLLKWQQGFRAKIPGLLNQTSRSLDQIPGYLNRIHELLNGTRGLFPGPSRRTLGAPDISSGTSDTGSLPPNLQPGYSPSPTHPPTGQYTLFPLPPTLPTPVVQLHPLLPDPSAPTPTPTSPLLNTSYTHSQNLSQEG

SEQ ID NO: 22 - protein, 332 aa, Artificial sequence
  Synthetic
SPAPPACDLSVLSRLLRDSHVLHSRLSQCPEVHPLPTPVLLPAVDFSLGEWKTQMEETKAQDILGAVTLLLEGVMAARGQLGPTCLSSLLGQLSGQVRLLLGALQSLLGTQLPPQGRTTAHKDPNAIFLSFQHLLRGKVRFLMLVGGSTLCVRRAPPTTAVPSRTSLVLTLNELPNRTSGLLETNFTASARTTGSGLLKWQQGFRAKIPGLLNQTSRSLDQIPGYLNRIHELLNGTRGLFPGPSRRTLGAPDISSGTSDTGSLPPNLQPGYSPSPTHPPTGQYTLFPLPPTLPTPVVQLHPLLPDPSAPTPTPTSPLLNTSYTHSQNLSQEG

SEQ ID NO: 23 - protein, 332 aa, Artificial sequence
  Synthetic
SPAPPACDLTVLSDLLRDSHVLHSRLSQCPEVHPLPTPVLLPAVDFSLGEWKTQMEETKAQDILGAVTLLLEGVMAARGQLGPTCLSSLLGQLSGQVRLLLGALQSLLGTQLPPQGRTTAHKDPNAIFLSFQHLLRGKVRFLMLVGGSTLCVRRAPPTTAVPSRTSLVLTLNELPNRTSGLLETNFTASARTTGSGLLKWQQGFRAKIPGLLNQTSRSLDQIPGYLNRIHELLNGTRGLFPGPSRRTLGAPDISSGTSDTGSLPPNLQPGYSPSPTHPPTGQYTLFPLPPTLPTPVVQLHPLLPDPSAPTPTPTSPLLNTSYTHSQNLSQEG

SEQ ID NO: 24 - protein, 332 aa, Artificial sequence
  Synthetic
SPAPPACDLTVLSELLRDSHVLHSRLSQCPEVHPLPTPVLLPAVDFSLGEWKTQMEETKAQDILGAVTLLLEGVMAARGQLGPTCLSSLLGQLSGQVRLLLGALQSLLGTQLPPQGRTTAHKDPNAIFLSFQHLLRGKVRFLMLVGGSTLCVRRAPPTTAVPSRTSLVLTLNELPNRTSGLLETNFTASARTTGSGLLKWQQGFRAKIPGLLNQTSRSLDQIPGYLNRIHELLNGTRGLFPGPSRRTLGAPDISSGTSDTGSLPPNLQPGYSPSPTHPPTGQYTLFPLPPTLPTPVVQLHPLLPDPSAPTPTPTSPLLNTSYTHSQNLSQEG

SEQ ID NO: 25 - protein, 332 aa, Artificial sequence
  Synthetic
SPAPPACDLTVLSRLLRDSHVLHSRLSQCPEVHPLPTPVLLPAVDFSLGEWKTQMEETKAQDILGAVTLLLEGVMAARGQLGPTCLSSLLGQLSGQVRLLLGALQSLLGTQLPPQGRTTAHKDPNAIFLSFQHLLRGKVRFLMLVGGSTLCVRRAPPTTAVPSRTSLVLTLNELPNRTSGLLETNFTASARTTGSGLLKWQQGFRAKIPGLLNQTSRSLDQIPGYLNRIHELLNGTRGLFPGPSRRTLGAPDISSGTSDTGSLPPNLQPGYSPSPTHPPTGQYTLFPLPPTLPTPVVQLHPLLPDPSAPTPTPTSPLLNTSYTHSQNLSQEG

SEQ ID NO: 26 - protein, 332 aa, Artificial sequence
  Synthetic
SPAPPACDLRVLSKLLRDSHVLHSRLSQCPEVHPLPTPVLLPAVDFSLGEWKTQMEETKAQDILGAVTLLLEGVMAARGQLGPTCLSSLLGQLSGQVRLLLGALQSLLGTQLPPQGRTTAHKDPNAIFLSFQHLLDGKVRFLMLVGGSTLCVRRAPPTTAVPSRTSLVLTLNELPNRTSGLLETNFTASARTTGSGLLKWQQGFRAKIPGLLNQTSRSLDQIPGYLNRIHELLNGTRGLFPGPSRRTLGAPDISSGTSDTGSLPPNLQPGYSPSPTHPPTGQYTLFPLPPTLPTPVVQLHPLLPDPSAPTPTPTSPLLNTSYTHSQNLSQEG

SEQ ID NO: 27 - protein, 332 aa, Artificial sequence
  Synthetic
SPAPPACDLRVLSKLLRDSHVLHSRLSQCPEVHPLPTPVLLPAVDFSLGEWKTQMEETKAQDILGAVTLLLEGVMAARGQLGPTCLSSLLGQLSGQVRLLLGALQSLLGTQLPPQGRTTAHKDPNAIFLSFQHLLEGKVRFLMLVGGSTLCVRRAPPTTAVPSRTSLVLTLNELPNRTSGLLETNFTASARTTGSGLLKWQQGFRAKIPGLLNQTSRSLDQIPGYLNRIHELLNGTRGLFPGPSRRTLGAPDISSGTSDTGSLPPNLQPGYSPSPTHPPTGQYTLFPLPPTLPTPVVQLHPLLPDPSAPTPTPTSPLLNTSYTHSQNLSQEG

SEQ ID NO: 28 - protein, 332 aa, Artificial sequence
  Synthetic
SPAPPACDLRVLSKLLRDSHVLHSRLSQCPEVHPLPTPVLLPAVDFSLGEWKTQMEETKAQDILGAVTLLLEGVMAARGQLGPTCLSSLLGQLSGQVRLLLGALQSLLGTQLPPQGRTTAHKDPNAIFLSFQHLLQGKVRFLMLVGGSTLCVRRAPPTTAVPSRTSLVLTLNELPNRTSGLLETNFTASARTTGSGLLKWQQGFRAKIPGLLNQTSRSLDQIPGYLNRIHELLNGTRGLFPGPSRRTLGAPDISSGTSDTGSLPPNLQPGYSPSPTHPPTGQYTLFPLPPTLPTPVVQLHPLLPDPSAPTPTPTSPLLNTSYTHSQNLSQEG

SEQ ID NO: 29 - protein, 332 aa, Artificial sequence
  Synthetic
SPAPPACDLRVLSKLLRDSHVLHSRLSQCPEVHPLPTPVLLPAVDFSLGEWKTQMEETKAQDILGAVTLLLEGVMAARGQLGPTCLSSLLGQLSGQVRLLLGALQSLLGTQLPPQGRTTAHKDPNAIFLSFQHLLKGKVRFLMLVGGSTLCVRRAPPTTAVPSRTSLVLTLNELPNRTSGLLETNFTASARTTGSGLLKWQQGFRAKIPGLLNQTSRSLDQIPGYLNRIHELLNGTRGLFPGPSRRTLGAPDISSGTSDTGSLPPNLQPGYSPSPTHPPTGQYTLFPLPPTLPTPVVQLHPLLPDPSAPTPTPTSPLLNTSYTHSQNLSQEG

SEQ ID NO: 30 - protein, 332 aa, Artificial sequence
  Synthetic
SPAPPACDLRVLSKLLRDSHVLHSRLSQCPEVHPLPTPVLLPAVDFSLGEWKTQMEETKAQDILGAVTLLLEGVMAARGQLGPTCLSSLLGQLSGQVRLLLGALQSLLGTQLPPQGRTTAHKDPNAIFLSFQHLLRGKVDFLMLVGGSTLCVRRAPPTTAVPSRTSLVLTLNELPNRTSGLLETNFTASARTTGSGLLKWQQGFRAKIPGLLNQTSRSLDQIPGYLNRIHELLNGTRGLFPGPSRRTLGAPDISSGTSDTGSLPPNLQPGYSPSPTHPPTGQYTLFPLPPTLPTPVVQLHPLLPDPSAPTPTPTSPLLNTSYTHSQNLSQEG

SEQ ID NO: 31 - protein, 332 aa, Artificial sequence
  Synthetic
SPAPPACDLRVLSKLLRDSHVLHSRLSQCPEVHPLPTPVLLPAVDFSLGEWKTQMEETKAQDILGAVTLLLEGVMAARGQLGPTCLSSLLGQLSGQVRLLLGALQSLLGTQLPPQGRTTAHKDPNAIFLSFQHLLRGKVEFLMLVGGSTLCVRRAPPTTAVPSRTSLVLTLNELPNRTSGLLETNFTASARTTGSGLLKWQQGFRAKIPGLLNQTSRSLDQIPGYLNRIHELLNGTRGLFPGPSRRTLGAPDISSGTSDTGSLPPNLQPGYSPSPTHPPTGQYTLFPLPPTLPTPVVQLHPLLPDPSAPTPTPTSPLLNTSYTHSQNLSQEG

SEQ ID NO: 32 - protein, 332 aa, Artificial sequence
  Synthetic
SPAPPACDLRVLSKLLRDSHVLHSRLSQCPEVHPLPTPVLLPAVDFSLGEWKTQMEETKAQDILGAVTLLLEGVMAARGQLGPTCLSSLLGQLSGQVRLLLGALQSLLGTQLPPQGRTTAHKDPNAIFLSFQHLLRGNVDFLMLVGGSTLCVRRAPPTTAVPSRTSLVLTLNELPNRTSGLLETNFTASARTTGSGLLKWQQGFRAKIPGLLNQTSRSLDQIPGYLNRIHELLNGTRGLFPGPSRRTLGAPDISSGTSDTGSLPPNLQPGYSPSPTHPPTGQYTLFPLPPTLPTPVVQLHPLLPDPSAPTPTPTSPLLNTSYTHSQNLSQEG

SEQ ID NO: 33 - protein, 332 aa, Artificial sequence
  Synthetic
SPAPPACDLRVLSKLLRDSHVLHSRLSQCPEVHPLPTPVLLPAVDFSLGEWKTQMEETKAQDILGAVTLLLEGVMAARGQLGPTCLSSLLGQLSGQVRLLLGALQSLLGTQLPPQGRTTAHKDPNAIFLSFQHLLRGQVDFLMLVGGSTLCVRRAPPTTAVPSRTSLVLTLNELPNRTSGLLETNFTASARTTGSGLLKWQQGFRAKIPGLLNQTSRSLDQIPGYLNRIHELLNGTRGLFPGPSRRTLGAPDISSGTSDTGSLPPNLQPGYSPSPTHPPTGQYTLFPLPPTLPTPVVQLHPLLPDPSAPTPTPTSPLLNTSYTHSQNLSQEG

SEQ ID NO: 34 - protein, 332 aa, Artificial sequence
  Synthetic
SPAPPACDLRVLSKLLRDSHVLHSRLSQCPEVHPLPTPVLLPAVDFSLGEWKTQMEETKAQDILGAVTLLLEGVMAARGQLGPTCLSSLLGQLSGQVRLLLGALQSLLGTQLPPQGRTTAHKDPNAIFLSFQHLLRGSVDFLMLVGGSTLCVRRAPPTTAVPSRTSLVLTLNELPNRTSGLLETNFTASARTTGSGLLKWQQGFRAKIPGLLNQTSRSLDQIPGYLNRIHELLNGTRGLFPGPSRRTLGAPDISSGTSDTGSLPPNLQPGYSPSPTHPPTGQYTLFPLPPTLPTPVVQLHPLLPDPSAPTPTPTSPLLNTSYTHSQNLSQEG

SEQ ID NO: 35 - protein, 332 aa, Artificial sequence
  Synthetic
SPAPPACDLRVLSKLLRDSHVLHSRLSQCPEVHPLPTPVLLPAVDFSLGEWKTQMEETKAQDILGAVTLLLEGVMAARGQLGPTCLSSLLGQLSGQVRLLLGALQSLLGTQLPPQGRTTAHKDPNAIFLSFQHLLRGTVDFLMLVGGSTLCVRRAPPTTAVPSRTSLVLTLNELPNRTSGLLETNFTASARTTGSGLLKWQQGFRAKIPGLLNQTSRSLDQIPGYLNRIHELLNGTRGLFPGPSRRTLGAPDISSGTSDTGSLPPNLQPGYSPSPTHPPTGQYTLFPLPPTLPTPVVQLHPLLPDPSAPTPTPTSPLLNTSYTHSQNLSQEG

SEQ ID NO: 36 - protein, 332 aa, Artificial sequence
  Synthetic
SPAPPACDLRVLSKLLRDSHVLHSRLSQCPEVHPLPTPVLLPAVDFSLGEWKTQMEETKAQDILGAVTLLLEGVMAARGQLGPTCLSSLLGQLSGQVRLLLGALQSLLGTQLPPQGRTTAHKDPNAIFLSFQHLLRGRVDFLMLVGGSTLCVRRAPPTTAVPSRTSLVLTLNELPNRTSGLLETNFTASARTTGSGLLKWQQGFRAKIPGLLNQTSRSLDQIPGYLNRIHELLNGTRGLFPGPSRRTLGAPDISSGTSDTGSLPPNLQPGYSPSPTHPPTGQYTLFPLPPTLPTPVVQLHPLLPDPSAPTPTPTSPLLNTSYTHSQNLSQEG

SEQ ID NO: 37 - protein, 332 aa, Artificial sequence
  Synthetic
SPAPPACDLRVLSKLLRDSHVLHSRLSQCPEVHPLPTPVLLPAVDFSLGEWKTQMEETKAQDILGAVTLLLEGVMAARGQLGPTCLSSLLGQLSGQVRLLLGALQSLLGTQLPPQGRTTAHKDPNAIFLSFQHLLRGNVEFLMLVGGSTLCVRRAPPTTAVPSRTSLVLTLNELPNRTSGLLETNFTASARTTGSGLLKWQQGFRAKIPGLLNQTSRSLDQIPGYLNRIHELLNGTRGLFPGPSRRTLGAPDISSGTSDTGSLPPNLQPGYSPSPTHPPTGQYTLFPLPPTLPTPVVQLHPLLPDPSAPTPTPTSPLLNTSYTHSQNLSQEG

SEQ ID NO: 38 - protein, 332 aa, Artificial sequence
  Synthetic
SPAPPACDLRVLSKLLRDSHVLHSRLSQCPEVHPLPTPVLLPAVDFSLGEWKTQMEETKAQDILGAVTLLLEGVMAARGQLGPTCLSSLLGQLSGQVRLLLGALQSLLGTQLPPQGRTTAHKDPNAIFLSFQHLLRGSVEFLMLVGGSTLCVRRAPPTTAVPSRTSLVLTLNELPNRTSGLLETNFTASARTTGSGLLKWQQGFRAKIPGLLNQTSRSLDQIPGYLNRIHELLNGTRGLFPGPSRRTLGAPDISSGTSDTGSLPPNLQPGYSPSPTHPPTGQYTLFPLPPTLPTPVVQLHPLLPDPSAPTPTPTSPLLNTSYTHSQNLSQEG

SEQ ID NO: 39 - protein, 332 aa, Artificial sequence
  Synthetic
SPAPPACDLRVLSKLLRDSHVLHSRLSQCPEVHPLPTPVLLPAVDFSLGEWKTQMEETKAQDILGAVTLLLEGVMAARGQLGPTCLSSLLGQLSGQVRLLLGALQSLLGTQLPPQGRTTAHKDPNAIFLSFQHLLRGRVEFLMLVGGSTLCVRRAPPTTAVPSRTSLVLTLNELPNRTSGLLETNFTASARTTGSGLLKWQQGFRAKIPGLLNQTSRSLDQIPGYLNRIHELLNGTRGLFPGPSRRTLGAPDISSGTSDTGSLPPNLQPGYSPSPTHPPTGQYTLFPLPPTLPTPVVQLHPLLPDPSAPTPTPTSPLLNTSYTHSQNLSQEG

SEQ ID NO: 40 - protein, 332 aa, Artificial sequence
  Synthetic
SPAPPACDLRVLSKLLRDSHVLHSRLSQCPEVHPLPTPVLLPAVDFSLGEWKTQMEETKAQDILGAVTLLLEGVMAARGQLGPTCLSSLLGQLSGQVRLLLGALQSLLGTQLPPQGRTTAHKDPNAIFLSFQHLLRGQVEFLMLVGGSTLCVRRAPPTTAVPSRTSLVLTLNELPNRTSGLLETNFTASARTTGSGLLKWQQGFRAKIPGLLNQTSRSLDQIPGYLNRIHELLNGTRGLFPGPSRRTLGAPDISSGTSDTGSLPPNLQPGYSPSPTHPPTGQYTLFPLPPTLPTPVVQLHPLLPDPSAPTPTPTSPLLNTSYTHSQNLSQEG

SEQ ID NO: 41 - protein, 332 aa, Artificial sequence
  Synthetic
SPAPPACDLRVLSKLLRDSHVLHSRLSQCPEVHPLPTPVLLPAVDFSLGEWKTQMEETKAQDILGAVTLLLEGVMAARGQLGPTCLSSLLGQLSGQVRLLLGALQSLLGTQLPPQGRTTAHKDPNAIFLSFQHLLRGTVEFLMLVGGSTLCVRRAPPTTAVPSRTSLVLTLNELPNRTSGLLETNFTASARTTGSGLLKWQQGFRAKIPGLLNQTSRSLDQIPGYLNRIHELLNGTRGLFPGPSRRTLGAPDISSGTSDTGSLPPNLQPGYSPSPTHPPTGQYTLFPLPPTLPTPVVQLHPLLPDPSAPTPTPTSPLLNTSYTHSQNLSQEG

SEQ ID NO: 42 - protein, 332 aa, Artificial sequence
  Synthetic
SPAPPACDARALSKLLEDSHVLHSRLSQCPEVHPLPTPVLLPAVDFSLGEWKTQMEETKAQDILGAVTLLLEGVMAARGQLGPTCLSSLLGQLSGQVRLLLGALQSLLGTQLPPQGRTTAHKDPNAIFLSFQHLLRGKVRFLMLVGGSTLCVRRAPPTTAVPSRTSLVLTLNELPNRTSGLLETNFTASARTTGSGLLKWQQGFRAKIPGLLNQTSRSLDQIPGYLNRIHELLNGTRGLFPGPSRRTLGAPDISSGTSDTGSLPPNLQPGYSPSPTHPPTGQYTLFPLPPTLPTPVVQLHPLLPDPSAPTPTPTSPLLNTSYTHSQNLSQEG

SEQ ID NO: 43 - protein, 332 aa, Artificial sequence
  Synthetic
SPAPPACDARALSKALEDSHVLHSRLSQCPEVHPLPTPVLLPAVDFSLGEWKTQMEETKAQDILGAVTLLLEGVMAARGQLGPTCLSSLLGQLSGQVRLLLGALQSLLGTQLPPQGRTTAHKDPNAIFLSFQHLLRGKVRFLMLVGGSTLCVRRAPPTTAVPSRTSLVLTLNELPNRTSGLLETNFTASARTTGSGLLKWQQGFRAKIPGLLNQTSRSLDQIPGYLNRIHELLNGTRGLFPGPSRRTLGAPDISSGTSDTGSLPPNLQPGYSPSPTHPPTGQYTLFPLPPTLPTPVVQLHPLLPDPSAPTPTPTSPLLNTSYTHSQNLSQEG

SEQ ID NO: 44 - protein, 332 aa, Artificial sequence
  Synthetic
SPAPPACDARALSKALSDSHVLHSRLSQCPEVHPLPTPVLLPAVDFSLGEWKTQMEETKAQDILGAVTLLLEGVMAARGQLGPTCLSSLLGQLSGQVRLLLGALQSLLGTQLPPQGRTTAHKDPNAIFLSFQHLLRGKVRFLMLVGGSTLCVRRAPPTTAVPSRTSLVLTLNELPNRTSGLLETNFTASARTTGSGLLKWQQGFRAKIPGLLNQTSRSLDQIPGYLNRIHELLNGTRGLFPGPSRRTLGAPDISSGTSDTGSLPPNLQPGYSPSPTHPPTGQYTLFPLPPTLPTPVVQLHPLLPDPSAPTPTPTSPLLNTSYTHSQNLSQEG

SEQ ID NO: 45 - protein, 332 aa, Artificial sequence
  Synthetic
SPAPPACDARALSKALADSHVLHSRLSQCPEVHPLPTPVLLPAVDFSLGEWKTQMEETKAQDILGAVTLLLEGVMAARGQLGPTCLSSLLGQLSGQVRLLLGALQSLLGTQLPPQGRTTAHKDPNAIFLSFQHLLRGKVRFLMLVGGSTLCVRRAPPTTAVPSRTSLVLTLNELPNRTSGLLETNFTASARTTGSGLLKWQQGFRAKIPGLLNQTSRSLDQIPGYLNRIHELLNGTRGLFPGPSRRTLGAPDISSGTSDTGSLPPNLQPGYSPSPTHPPTGQYTLFPLPPTLPTPVVQLHPLLPDPSAPTPTPTSPLLNTSYTHSQNLSQEG

SEQ ID NO: 46 - protein, 332 aa, Artificial sequence
  Synthetic
SPAPPACDARALSKILEDSHVLHSRLSQCPEVHPLPTPVLLPAVDFSLGEWKTQMEETKAQDILGAVTLLLEGVMAARGQLGPTCLSSLLGQLSGQVRLLLGALQSLLGTQLPPQGRTTAHKDPNAIFLSFQHLLRGKVRFLMLVGGSTLCVRRAPPTTAVPSRTSLVLTLNELPNRTSGLLETNFTASARTTGSGLLKWQQGFRAKIPGLLNQTSRSLDQIPGYLNRIHELLNGTRGLFPGPSRRTLGAPDISSGTSDTGSLPPNLQPGYSPSPTHPPTGQYTLFPLPPTLPTPVVQLHPLLPDPSAPTPTPTSPLLNTSYTHSQNLSQEG

SEQ ID NO: 47 - protein, 332 aa, Artificial sequence
  Synthetic
SPAPPACDARALSKVLEDSHVLHSRLSQCPEVHPLPTPVLLPAVDFSLGEWKTQMEETKAQDILGAVTLLLEGVMAARGQLGPTCLSSLLGQLSGQVRLLLGALQSLLGTQLPPQGRTTAHKDPNAIFLSFQHLLRGKVRFLMLVGGSTLCVRRAPPTTAVPSRTSLVLTLNELPNRTSGLLETNFTASARTTGSGLLKWQQGFRAKIPGLLNQTSRSLDQIPGYLNRIHELLNGTRGLFPGPSRRTLGAPDISSGTSDTGSLPPNLQPGYSPSPTHPPTGQYTLFPLPPTLPTPVVQLHPLLPDPSAPTPTPTSPLLNTSYTHSQNLSQEG

SEQ ID NO: 48 - protein, 332 aa, Artificial sequence
  Synthetic
SPAPPACDARALSRLLEDSHVLHSRLSQCPEVHPLPTPVLLPAVDFSLGEWKTQMEETKAQDILGAVTLLLEGVMAARGQLGPTCLSSLLGQLSGQVRLLLGALQSLLGTQLPPQGRTTAHKDPNAIFLSFQHLLRGKVRFLMLVGGSTLCVRRAPPTTAVPSRTSLVLTLNELPNRTSGLLETNFTASARTTGSGLLKWQQGFRAKIPGLLNQTSRSLDQIPGYLNRIHELLNGTRGLFPGPSRRTLGAPDISSGTSDTGSLPPNLQPGYSPSPTHPPTGQYTLFPLPPTLPTPVVQLHPLLPDPSAPTPTPTSPLLNTSYTHSQNLSQEG

SEQ ID NO: 49 - protein, 332 aa, Artificial sequence
  Synthetic
SPAPPACDARALSRALEDSHVLHSRLSQCPEVHPLPTPVLLPAVDFSLGEWKTQMEETKAQDILGAVTLLLEGVMAARGQLGPTCLSSLLGQLSGQVRLLLGALQSLLGTQLPPQGRTTAHKDPNAIFLSFQHLLRGKVRFLMLVGGSTLCVRRAPPTTAVPSRTSLVLTLNELPNRTSGLLETNFTASARTTGSGLLKWQQGFRAKIPGLLNQTSRSLDQIPGYLNRIHELLNGTRGLFPGPSRRTLGAPDISSGTSDTGSLPPNLQPGYSPSPTHPPTGQYTLFPLPPTLPTPVVQLHPLLPDPSAPTPTPTSPLLNTSYTHSQNLSQEG

SEQ ID NO: 50 - protein, 332 aa, Artificial sequence
  Synthetic
SPAPPACDARALSRALSDSHVLHSRLSQCPEVHPLPTPVLLPAVDFSLGEWKTQMEETKAQDILGAVTLLLEGVMAARGQLGPTCLSSLLGQLSGQVRLLLGALQSLLGTQLPPQGRTTAHKDPNAIFLSFQHLLRGKVRFLMLVGGSTLCVRRAPPTTAVPSRTSLVLTLNELPNRTSGLLETNFTASARTTGSGLLKWQQGFRAKIPGLLNQTSRSLDQIPGYLNRIHELLNGTRGLFPGPSRRTLGAPDISSGTSDTGSLPPNLQPGYSPSPTHPPTGQYTLFPLPPTLPTPVVQLHPLLPDPSAPTPTPTSPLLNTSYTHSQNLSQEG

SEQ ID NO: 51 - protein, 332 aa, Artificial sequence
  Synthetic
SPAPPACDARALSRALADSHVLHSRLSQCPEVHPLPTPVLLPAVDFSLGEWKTQMEETKAQDILGAVTLLLEGVMAARGQLGPTCLSSLLGQLSGQVRLLLGALQSLLGTQLPPQGRTTAHKDPNAIFLSFQHLLRGKVRFLMLVGGSTLCVRRAPPTTAVPSRTSLVLTLNELPNRTSGLLETNFTASARTTGSGLLKWQQGFRAKIPGLLNQTSRSLDQIPGYLNRIHELLNGTRGLFPGPSRRTLGAPDISSGTSDTGSLPPNLQPGYSPSPTHPPTGQYTLFPLPPTLPTPVVQLHPLLPDPSAPTPTPTSPLLNTSYTHSQNLSQEG

SEQ ID NO: 52 - protein, 332 aa, Artificial sequence
  Synthetic
SPAPPACDARALSRILEDSHVLHSRLSQCPEVHPLPTPVLLPAVDFSLGEWKTQMEETKAQDILGAVTLLLEGVMAARGQLGPTCLSSLLGQLSGQVRLLLGALQSLLGTQLPPQGRTTAHKDPNAIFLSFQHLLRGKVRFLMLVGGSTLCVRRAPPTTAVPSRTSLVLTLNELPNRTSGLLETNFTASARTTGSGLLKWQQGFRAKIPGLLNQTSRSLDQIPGYLNRIHELLNGTRGLFPGPSRRTLGAPDISSGTSDTGSLPPNLQPGYSPSPTHPPTGQYTLFPLPPTLPTPVVQLHPLLPDPSAPTPTPTSPLLNTSYTHSQNLSQEG

SEQ ID NO: 53 - protein, 332 aa, Artificial sequence
  Synthetic
SPAPPACDARALSRVLEDSHVLHSRLSQCPEVHPLPTPVLLPAVDFSLGEWKTQMEETKAQDILGAVTLLLEGVMAARGQLGPTCLSSLLGQLSGQVRLLLGALQSLLGTQLPPQGRTTAHKDPNAIFLSFQHLLRGKVRFLMLVGGSTLCVRRAPPTTAVPSRTSLVLTLNELPNRTSGLLETNFTASARTTGSGLLKWQQGFRAKIPGLLNQTSRSLDQIPGYLNRIHELLNGTRGLFPGPSRRTLGAPDISSGTSDTGSLPPNLQPGYSPSPTHPPTGQYTLFPLPPTLPTPVVQLHPLLPDPSAPTPTPTSPLLNTSYTHSQNLSQEG

SEQ ID NO: 54 - protein, 332 aa, Artificial sequence
  Synthetic
SPAPPACDARVLSKLLEDSHVLHSRLSQCPEVHPLPTPVLLPAVDFSLGEWKTQMEETKAQDILGAVTLLLEGVMAARGQLGPTCLSSLLGQLSGQVRLLLGALQSLLGTQLPPQGRTTAHKDPNAIFLSFQHLLRGKVRFLMLVGGSTLCVRRAPPTTAVPSRTSLVLTLNELPNRTSGLLETNFTASARTTGSGLLKWQQGFRAKIPGLLNQTSRSLDQIPGYLNRIHELLNGTRGLFPGPSRRTLGAPDISSGTSDTGSLPPNLQPGYSPSPTHPPTGQYTLFPLPPTLPTPVVQLHPLLPDPSAPTPTPTSPLLNTSYTHSQNLSQEG

SEQ ID NO: 55 - protein, 332 aa, Artificial sequence
  Synthetic
SPAPPACDARVLSKALEDSHVLHSRLSQCPEVHPLPTPVLLPAVDFSLGEWKTQMEETKAQDILGAVTLLLEGVMAARGQLGPTCLSSLLGQLSGQVRLLLGALQSLLGTQLPPQGRTTAHKDPNAIFLSFQHLLRGKVRFLMLVGGSTLCVRRAPPTTAVPSRTSLVLTLNELPNRTSGLLETNFTASARTTGSGLLKWQQGFRAKIPGLLNQTSRSLDQIPGYLNRIHELLNGTRGLFPGPSRRTLGAPDISSGTSDTGSLPPNLQPGYSPSPTHPPTGQYTLFPLPPTLPTPVVQLHPLLPDPSAPTPTPTSPLLNTSYTHSQNLSQEG

SEQ ID NO: 56 - protein, 332 aa, Artificial sequence
  Synthetic
SPAPPACDARVLSKILEDSHVLHSRLSQCPEVHPLPTPVLLPAVDFSLGEWKTQMEETKAQDILGAVTLLLEGVMAARGQLGPTCLSSLLGQLSGQVRLLLGALQSLLGTQLPPQGRTTAHKDPNAIFLSFQHLLRGKVRFLMLVGGSTLCVRRAPPTTAVPSRTSLVLTLNELPNRTSGLLETNFTASARTTGSGLLKWQQGFRAKIPGLLNQTSRSLDQIPGYLNRIHELLNGTRGLFPGPSRRTLGAPDISSGTSDTGSLPPNLQPGYSPSPTHPPTGQYTLFPLPPTLPTPVVQLHPLLPDPSAPTPTPTSPLLNTSYTHSQNLSQEG

SEQ ID NO: 57 - protein, 332 aa, Artificial sequence
  Synthetic
SPAPPACDARVLSKVLEDSHVLHSRLSQCPEVHPLPTPVLLPAVDFSLGEWKTQMEETKAQDILGAVTLLLEGVMAARGQLGPTCLSSLLGQLSGQVRLLLGALQSLLGTQLPPQGRTTAHKDPNAIFLSFQHLLRGKVRFLMLVGGSTLCVRRAPPTTAVPSRTSLVLTLNELPNRTSGLLETNFTASARTTGSGLLKWQQGFRAKIPGLLNQTSRSLDQIPGYLNRIHELLNGTRGLFPGPSRRTLGAPDISSGTSDTGSLPPNLQPGYSPSPTHPPTGQYTLFPLPPTLPTPVVQLHPLLPDPSAPTPTPTSPLLNTSYTHSQNLSQEG

SEQ ID NO: 58 - protein, 332 aa, Artificial sequence
  Synthetic
SPAPPACDARVLSRLLEDSHVLHSRLSQCPEVHPLPTPVLLPAVDFSLGEWKTQMEETKAQDILGAVTLLLEGVMAARGQLGPTCLSSLLGQLSGQVRLLLGALQSLLGTQLPPQGRTTAHKDPNAIFLSFQHLLRGKVRFLMLVGGSTLCVRRAPPTTAVPSRTSLVLTLNELPNRTSGLLETNFTASARTTGSGLLKWQQGFRAKIPGLLNQTSRSLDQIPGYLNRIHELLNGTRGLFPGPSRRTLGAPDISSGTSDTGSLPPNLQPGYSPSPTHPPTGQYTLFPLPPTLPTPVVQLHPLLPDPSAPTPTPTSPLLNTSYTHSQNLSQEG

SEQ ID NO: 59 - protein, 332 aa, Artificial sequence
  Synthetic
SPAPPACDARVLSRALEDSHVLHSRLSQCPEVHPLPTPVLLPAVDFSLGEWKTQMEETKAQDILGAVTLLLEGVMAARGQLGPTCLSSLLGQLSGQVRLLLGALQSLLGTQLPPQGRTTAHKDPNAIFLSFQHLLRGKVRFLMLVGGSTLCVRRAPPTTAVPSRTSLVLTLNELPNRTSGLLETNFTASARTTGSGLLKWQQGFRAKIPGLLNQTSRSLDQIPGYLNRIHELLNGTRGLFPGPSRRTLGAPDISSGTSDTGSLPPNLQPGYSPSPTHPPTGQYTLFPLPPTLPTPVVQLHPLLPDPSAPTPTPTSPLLNTSYTHSQNLSQEG

SEQ ID NO: 60 - protein, 332 aa, Artificial sequence
  Synthetic
SPAPPACDARVLSRILEDSHVLHSRLSQCPEVHPLPTPVLLPAVDFSLGEWKTQMEETKAQDILGAVTLLLEGVMAARGQLGPTCLSSLLGQLSGQVRLLLGALQSLLGTQLPPQGRTTAHKDPNAIFLSFQHLLRGKVRFLMLVGGSTLCVRRAPPTTAVPSRTSLVLTLNELPNRTSGLLETNFTASARTTGSGLLKWQQGFRAKIPGLLNQTSRSLDQIPGYLNRIHELLNGTRGLFPGPSRRTLGAPDISSGTSDTGSLPPNLQPGYSPSPTHPPTGQYTLFPLPPTLPTPVVQLHPLLPDPSAPTPTPTSPLLNTSYTHSQNLSQEG

SEQ ID NO: 61 - protein, 332 aa, Artificial sequence
  Synthetic
SPAPPACDARVLSRVLEDSHVLHSRLSQCPEVHPLPTPVLLPAVDFSLGEWKTQMEETKAQDILGAVTLLLEGVMAARGQLGPTCLSSLLGQLSGQVRLLLGALQSLLGTQLPPQGRTTAHKDPNAIFLSFQHLLRGKVRFLMLVGGSTLCVRRAPPTTAVPSRTSLVLTLNELPNRTSGLLETNFTASARTTGSGLLKWQQGFRAKIPGLLNQTSRSLDQIPGYLNRIHELLNGTRGLFPGPSRRTLGAPDISSGTSDTGSLPPNLQPGYSPSPTHPPTGQYTLFPLPPTLPTPVVQLHPLLPDPSAPTPTPTSPLLNTSYTHSQNLSQEG

SEQ ID NO: 62 - protein, 332 aa, Artificial sequence
  Synthetic
SPAPPACDARILSKLLEDSHVLHSRLSQCPEVHPLPTPVLLPAVDFSLGEWKTQMEETKAQDILGAVTLLLEGVMAARGQLGPTCLSSLLGQLSGQVRLLLGALQSLLGTQLPPQGRTTAHKDPNAIFLSFQHLLRGKVRFLMLVGGSTLCVRRAPPTTAVPSRTSLVLTLNELPNRTSGLLETNFTASARTTGSGLLKWQQGFRAKIPGLLNQTSRSLDQIPGYLNRIHELLNGTRGLFPGPSRRTLGAPDISSGTSDTGSLPPNLQPGYSPSPTHPPTGQYTLFPLPPTLPTPVVQLHPLLPDPSAPTPTPTSPLLNTSYTHSQNLSQEG

SEQ ID NO: 63 - protein, 332 aa, Artificial sequence
  Synthetic
SPAPPACDARILSKALEDSHVLHSRLSQCPEVHPLPTPVLLPAVDFSLGEWKTQMEETKAQDILGAVTLLLEGVMAARGQLGPTCLSSLLGQLSGQVRLLLGALQSLLGTQLPPQGRTTAHKDPNAIFLSFQHLLRGKVRFLMLVGGSTLCVRRAPPTTAVPSRTSLVLTLNELPNRTSGLLETNFTASARTTGSGLLKWQQGFRAKIPGLLNQTSRSLDQIPGYLNRIHELLNGTRGLFPGPSRRTLGAPDISSGTSDTGSLPPNLQPGYSPSPTHPPTGQYTLFPLPPTLPTPVVQLHPLLPDPSAPTPTPTSPLLNTSYTHSQNLSQEG

SEQ ID NO: 64 - protein, 332 aa, Artificial sequence
  Synthetic
SPAPPACDARILSKILEDSHVLHSRLSQCPEVHPLPTPVLLPAVDFSLGEWKTQMEETKAQDILGAVTLLLEGVMAARGQLGPTCLSSLLGQLSGQVRLLLGALQSLLGTQLPPQGRTTAHKDPNAIFLSFQHLLRGKVRFLMLVGGSTLCVRRAPPTTAVPSRTSLVLTLNELPNRTSGLLETNFTASARTTGSGLLKWQQGFRAKIPGLLNQTSRSLDQIPGYLNRIHELLNGTRGLFPGPSRRTLGAPDISSGTSDTGSLPPNLQPGYSPSPTHPPTGQYTLFPLPPTLPTPVVQLHPLLPDPSAPTPTPTSPLLNTSYTHSQNLSQEG

SEQ ID NO: 65 - protein, 332 aa, Artificial sequence
  Synthetic
SPAPPACDARILSKVLEDSHVLHSRLSQCPEVHPLPTPVLLPAVDFSLGEWKTQMEETKAQDILGAVTLLLEGVMAARGQLGPTCLSSLLGQLSGQVRLLLGALQSLLGTQLPPQGRTTAHKDPNAIFLSFQHLLRGKVRFLMLVGGSTLCVRRAPPTTAVPSRTSLVLTLNELPNRTSGLLETNFTASARTTGSGLLKWQQGFRAKIPGLLNQTSRSLDQIPGYLNRIHELLNGTRGLFPGPSRRTLGAPDISSGTSDTGSLPPNLQPGYSPSPTHPPTGQYTLFPLPPTLPTPVVQLHPLLPDPSAPTPTPTSPLLNTSYTHSQNLSQEG

SEQ ID NO: 66 - protein, 332 aa, Artificial sequence
  Synthetic
SPAPPACDARILSRLLEDSHVLHSRLSQCPEVHPLPTPVLLPAVDFSLGEWKTQMEETKAQDILGAVTLLLEGVMAARGQLGPTCLSSLLGQLSGQVRLLLGALQSLLGTQLPPQGRTTAHKDPNAIFLSFQHLLRGKVRFLMLVGGSTLCVRRAPPTTAVPSRTSLVLTLNELPNRTSGLLETNFTASARTTGSGLLKWQQGFRAKIPGLLNQTSRSLDQIPGYLNRIHELLNGTRGLFPGPSRRTLGAPDISSGTSDTGSLPPNLQPGYSPSPTHPPTGQYTLFPLPPTLPTPVVQLHPLLPDPSAPTPTPTSPLLNTSYTHSQNLSQEG

SEQ ID NO: 67 - protein, 332 aa, Artificial sequence
  Synthetic
SPAPPACDARILSRALEDSHVLHSRLSQCPEVHPLPTPVLLPAVDFSLGEWKTQMEETKAQDILGAVTLLLEGVMAARGQLGPTCLSSLLGQLSGQVRLLLGALQSLLGTQLPPQGRTTAHKDPNAIFLSFQHLLRGKVRFLMLVGGSTLCVRRAPPTTAVPSRTSLVLTLNELPNRTSGLLETNFTASARTTGSGLLKWQQGFRAKIPGLLNQTSRSLDQIPGYLNRIHELLNGTRGLFPGPSRRTLGAPDISSGTSDTGSLPPNLQPGYSPSPTHPPTGQYTLFPLPPTLPTPVVQLHPLLPDPSAPTPTPTSPLLNTSYTHSQNLSQEG

SEQ ID NO: 68 - protein, 332 aa, Artificial sequence
  Synthetic
SPAPPACDARILSRILEDSHVLHSRLSQCPEVHPLPTPVLLPAVDFSLGEWKTQMEETKAQDILGAVTLLLEGVMAARGQLGPTCLSSLLGQLSGQVRLLLGALQSLLGTQLPPQGRTTAHKDPNAIFLSFQHLLRGKVRFLMLVGGSTLCVRRAPPTTAVPSRTSLVLTLNELPNRTSGLLETNFTASARTTGSGLLKWQQGFRAKIPGLLNQTSRSLDQIPGYLNRIHELLNGTRGLFPGPSRRTLGAPDISSGTSDTGSLPPNLQPGYSPSPTHPPTGQYTLFPLPPTLPTPVVQLHPLLPDPSAPTPTPTSPLLNTSYTHSQNLSQEG

SEQ ID NO: 69 - protein, 332 aa, Artificial sequence
  Synthetic
SPAPPACDARILSRVLEDSHVLHSRLSQCPEVHPLPTPVLLPAVDFSLGEWKTQMEETKAQDILGAVTLLLEGVMAARGQLGPTCLSSLLGQLSGQVRLLLGALQSLLGTQLPPQGRTTAHKDPNAIFLSFQHLLRGKVRFLMLVGGSTLCVRRAPPTTAVPSRTSLVLTLNELPNRTSGLLETNFTASARTTGSGLLKWQQGFRAKIPGLLNQTSRSLDQIPGYLNRIHELLNGTRGLFPGPSRRTLGAPDISSGTSDTGSLPPNLQPGYSPSPTHPPTGQYTLFPLPPTLPTPVVQLHPLLPDPSAPTPTPTSPLLNTSYTHSQNLSQEG

SEQ ID NO: 70 - protein, 332 aa, Artificial sequence
  Synthetic
SPAPPACDLRALSRVLEDSHVLHSRLSQCPEVHPLPTPVLLPAVDFSLGEWKTQMEETKAQDILGAVTLLLEGVMAARGQLGPTCLSSLLGQLSGQVRLLLGALQSLLGTQLPPQGRTTAHKDPNAIFLSFQHLLRGKVRFLMLVGGSTLCVRRAPPTTAVPSRTSLVLTLNELPNRTSGLLETNFTASARTTGSGLLKWQQGFRAKIPGLLNQTSRSLDQIPGYLNRIHELLNGTRGLFPGPSRRTLGAPDISSGTSDTGSLPPNLQPGYSPSPTHPPTGQYTLFPLPPTLPTPVVQLHPLLPDPSAPTPTPTSPLLNTSYTHSQNLSQEG

SEQ ID NO: 71 - protein, 332 aa, Artificial sequence
  Synthetic
SPAPPACDIRALSRVLEDSHVLHSRLSQCPEVHPLPTPVLLPAVDFSLGEWKTQMEETKAQDILGAVTLLLEGVMAARGQLGPTCLSSLLGQLSGQVRLLLGALQSLLGTQLPPQGRTTAHKDPNAIFLSFQHLLRGKVRFLMLVGGSTLCVRRAPPTTAVPSRTSLVLTLNELPNRTSGLLETNFTASARTTGSGLLKWQQGFRAKIPGLLNQTSRSLDQIPGYLNRIHELLNGTRGLFPGPSRRTLGAPDISSGTSDTGSLPPNLQPGYSPSPTHPPTGQYTLFPLPPTLPTPVVQLHPLLPDPSAPTPTPTSPLLNTSYTHSQNLSQEG

SEQ ID NO: 72 - protein, 332 aa, Artificial sequence
  Synthetic
SPAPPACDVRALSRVLEDSHVLHSRLSQCPEVHPLPTPVLLPAVDFSLGEWKTQMEETKAQDILGAVTLLLEGVMAARGQLGPTCLSSLLGQLSGQVRLLLGALQSLLGTQLPPQGRTTAHKDPNAIFLSFQHLLRGKVRFLMLVGGSTLCVRRAPPTTAVPSRTSLVLTLNELPNRTSGLLETNFTASARTTGSGLLKWQQGFRAKIPGLLNQTSRSLDQIPGYLNRIHELLNGTRGLFPGPSRRTLGAPDISSGTSDTGSLPPNLQPGYSPSPTHPPTGQYTLFPLPPTLPTPVVQLHPLLPDPSAPTPTPTSPLLNTSYTHSQNLSQEG

SEQ ID NO: 73 - protein, 332 aa, Artificial sequence
  Synthetic
SPAPPACDLRALSKVLEDSHVLHSRLSQCPEVHPLPTPVLLPAVDFSLGEWKTQMEETKAQDILGAVTLLLEGVMAARGQLGPTCLSSLLGQLSGQVRLLLGALQSLLGTQLPPQGRTTAHKDPNAIFLSFQHLLRGKVRFLMLVGGSTLCVRRAPPTTAVPSRTSLVLTLNELPNRTSGLLETNFTASARTTGSGLLKWQQGFRAKIPGLLNQTSRSLDQIPGYLNRIHELLNGTRGLFPGPSRRTLGAPDISSGTSDTGSLPPNLQPGYSPSPTHPPTGQYTLFPLPPTLPTPVVQLHPLLPDPSAPTPTPTSPLLNTSYTHSQNLSQEG

SEQ ID NO: 74 - protein, 332 aa, Artificial sequence
  Synthetic
SPAPPACDIRALSKVLEDSHVLHSRLSQCPEVHPLPTPVLLPAVDFSLGEWKTQMEETKAQDILGAVTLLLEGVMAARGQLGPTCLSSLLGQLSGQVRLLLGALQSLLGTQLPPQGRTTAHKDPNAIFLSFQHLLRGKVRFLMLVGGSTLCVRRAPPTTAVPSRTSLVLTLNELPNRTSGLLETNFTASARTTGSGLLKWQQGFRAKIPGLLNQTSRSLDQIPGYLNRIHELLNGTRGLFPGPSRRTLGAPDISSGTSDTGSLPPNLQPGYSPSPTHPPTGQYTLFPLPPTLPTPVVQLHPLLPDPSAPTPTPTSPLLNTSYTHSQNLSQEG

SEQ ID NO: 75 - protein, 332 aa, Artificial sequence
  Synthetic
SPAPPACDVRALSKVLEDSHVLHSRLSQCPEVHPLPTPVLLPAVDFSLGEWKTQMEETKAQDILGAVTLLLEGVMAARGQLGPTCLSSLLGQLSGQVRLLLGALQSLLGTQLPPQGRTTAHKDPNAIFLSFQHLLRGKVRFLMLVGGSTLCVRRAPPTTAVPSRTSLVLTLNELPNRTSGLLETNFTASARTTGSGLLKWQQGFRAKIPGLLNQTSRSLDQIPGYLNRIHELLNGTRGLFPGPSRRTLGAPDISSGTSDTGSLPPNLQPGYSPSPTHPPTGQYTLFPLPPTLPTPVVQLHPLLPDPSAPTPTPTSPLLNTSYTHSQNLSQEG

SEQ ID NO: 76 - protein, 332 aa, Artificial sequence
  Synthetic
SPAPPACDLRALSRALEDSHVLHSRLSQCPEVHPLPTPVLLPAVDFSLGEWKTQMEETKAQDILGAVTLLLEGVMAARGQLGPTCLSSLLGQLSGQVRLLLGALQSLLGTQLPPQGRTTAHKDPNAIFLSFQHLLRGKVRFLMLVGGSTLCVRRAPPTTAVPSRTSLVLTLNELPNRTSGLLETNFTASARTTGSGLLKWQQGFRAKIPGLLNQTSRSLDQIPGYLNRIHELLNGTRGLFPGPSRRTLGAPDISSGTSDTGSLPPNLQPGYSPSPTHPPTGQYTLFPLPPTLPTPVVQLHPLLPDPSAPTPTPTSPLLNTSYTHSQNLSQEG

SEQ ID NO: 77 - protein, 332 aa, Artificial sequence
  Synthetic
SPAPPACDIRALSRALEDSHVLHSRLSQCPEVHPLPTPVLLPAVDFSLGEWKTQMEETKAQDILGAVTLLLEGVMAARGQLGPTCLSSLLGQLSGQVRLLLGALQSLLGTQLPPQGRTTAHKDPNAIFLSFQHLLRGKVRFLMLVGGSTLCVRRAPPTTAVPSRTSLVLTLNELPNRTSGLLETNFTASARTTGSGLLKWQQGFRAKIPGLLNQTSRSLDQIPGYLNRIHELLNGTRGLFPGPSRRTLGAPDISSGTSDTGSLPPNLQPGYSPSPTHPPTGQYTLFPLPPTLPTPVVQLHPLLPDPSAPTPTPTSPLLNTSYTHSQNLSQEG

SEQ ID NO: 78 - protein, 332 aa, Artificial sequence
  Synthetic
SPAPPACDVRALSRALEDSHVLHSRLSQCPEVHPLPTPVLLPAVDFSLGEWKTQMEETKAQDILGAVTLLLEGVMAARGQLGPTCLSSLLGQLSGQVRLLLGALQSLLGTQLPPQGRTTAHKDPNAIFLSFQHLLRGKVRFLMLVGGSTLCVRRAPPTTAVPSRTSLVLTLNELPNRTSGLLETNFTASARTTGSGLLKWQQGFRAKIPGLLNQTSRSLDQIPGYLNRIHELLNGTRGLFPGPSRRTLGAPDISSGTSDTGSLPPNLQPGYSPSPTHPPTGQYTLFPLPPTLPTPVVQLHPLLPDPSAPTPTPTSPLLNTSYTHSQNLSQEG

SEQ ID NO: 79 - protein, 332 aa, Artificial sequence
  Synthetic
SPAPPACDLRVLSKLLRDSHVLHSRLSQCPEVHPLPTPVLLPAVDFSLGEWKTQMEETKAQDILGAVTALLEGVMAARGQLGPTCLSSLLGQLSGQVRLLLGALQSLLGTQLPPQGRTTAHKDPNAIFLSFQHLLRGKVRFLMLVGGSTLCVRRAPPTTAVPSRTSLVLTLNELPNRTSGLLETNFTASARTTGSGLLKWQQGFRAKIPGLLNQTSRSLDQIPGYLNRIHELLNGTRGLFPGPSRRTLGAPDISSGTSDTGSLPPNLQPGYSPSPTHPPTGQYTLFPLPPTLPTPVVQLHPLLPDPSAPTPTPTSPLLNTSYTHSQNLSQEG

SEQ ID NO: 80 - protein, 332 aa, Artificial sequence
  Synthetic
SPAPPACDLRVLSKLLRDSHVLHSRLSQCPEVHPLPTPVLLPAVDFSLGEWKTQMEETKAQDILGAVTALLEGVKAARGQLGPTCLSSLLGQLSGQVRLLLGALQSLLGTQLPPQGRTTAHKDPNAIFLSFQHLLRGKVRFLMLVGGSTLCVRRAPPTTAVPSRTSLVLTLNELPNRTSGLLETNFTASARTTGSGLLKWQQGFRAKIPGLLNQTSRSLDQIPGYLNRIHELLNGTRGLFPGPSRRTLGAPDISSGTSDTGSLPPNLQPGYSPSPTHPPTGQYTLFPLPPTLPTPVVQLHPLLPDPSAPTPTPTSPLLNTSYTHSQNLSQEG

SEQ ID NO: 81 - protein, 332 aa, Artificial sequence
  Synthetic
SPAPPACDLRVLSKLLRDSHVLHSRLSQCPEVHPLPTPVLLPAVDFSLGEWKTQMEETKAQDILGAVTALLEGVLAARGQLGPTCLSSLLGQLSGQVRLLLGALQSLLGTQLPPQGRTTAHKDPNAIFLSFQHLLRGKVRFLMLVGGSTLCVRRAPPTTAVPSRTSLVLTLNELPNRTSGLLETNFTASARTTGSGLLKWQQGFRAKIPGLLNQTSRSLDQIPGYLNRIHELLNGTRGLFPGPSRRTLGAPDISSGTSDTGSLPPNLQPGYSPSPTHPPTGQYTLFPLPPTLPTPVVQLHPLLPDPSAPTPTPTSPLLNTSYTHSQNLSQEG

SEQ ID NO: 82 - protein, 332 aa, Artificial sequence
  Synthetic
SPAPPACDLRVLSKLLRDSHVLHSRLSQCPEVHPLPTPVLLPAVDFSLGEWKTQMEETKAQDILGAVTALLEGVQAARGQLGPTCLSSLLGQLSGQVRLLLGALQSLLGTQLPPQGRTTAHKDPNAIFLSFQHLLRGKVRFLMLVGGSTLCVRRAPPTTAVPSRTSLVLTLNELPNRTSGLLETNFTASARTTGSGLLKWQQGFRAKIPGLLNQTSRSLDQIPGYLNRIHELLNGTRGLFPGPSRRTLGAPDISSGTSDTGSLPPNLQPGYSPSPTHPPTGQYTLFPLPPTLPTPVVQLHPLLPDPSAPTPTPTSPLLNTSYTHSQNLSQEG

SEQ ID NO: 83 - protein, 332 aa, Artificial sequence
  Synthetic
SPAPPACDLRVLSKLLRDSHVLHSRLSQCPEVHPLPTPVLLPAVDFSLGEWKTQMEETKAQDILGAVTALLEGAMAARGQLGPTCLSSLLGQLSGQVRLLLGALQSLLGTQLPPQGRTTAHKDPNAIFLSFQHLLRGKVRFLMLVGGSTLCVRRAPPTTAVPSRTSLVLTLNELPNRTSGLLETNFTASARTTGSGLLKWQQGFRAKIPGLLNQTSRSLDQIPGYLNRIHELLNGTRGLFPGPSRRTLGAPDISSGTSDTGSLPPNLQPGYSPSPTHPPTGQYTLFPLPPTLPTPVVQLHPLLPDPSAPTPTPTSPLLNTSYTHSQNLSQEG

SEQ ID NO: 84 - protein, 332 aa, Artificial sequence
  Synthetic
SPAPPACDLRVLSKLLRDSHVLHSRLSQCPEVHPLPTPVLLPAVDFSLGEWKTQMEETKAQDILGAVTALLEGAKAARGQLGPTCLSSLLGQLSGQVRLLLGALQSLLGTQLPPQGRTTAHKDPNAIFLSFQHLLRGKVRFLMLVGGSTLCVRRAPPTTAVPSRTSLVLTLNELPNRTSGLLETNFTASARTTGSGLLKWQQGFRAKIPGLLNQTSRSLDQIPGYLNRIHELLNGTRGLFPGPSRRTLGAPDISSGTSDTGSLPPNLQPGYSPSPTHPPTGQYTLFPLPPTLPTPVVQLHPLLPDPSAPTPTPTSPLLNTSYTHSQNLSQEG

SEQ ID NO: 85 - protein, 332 aa, Artificial sequence
  Synthetic
SPAPPACDLRVLSKLLRDSHVLHSRLSQCPEVHPLPTPVLLPAVDFSLGEWKTQMEETKAQDILGAVTALLEGALAARGQLGPTCLSSLLGQLSGQVRLLLGALQSLLGTQLPPQGRTTAHKDPNAIFLSFQHLLRGKVRFLMLVGGSTLCVRRAPPTTAVPSRTSLVLTLNELPNRTSGLLETNFTASARTTGSGLLKWQQGFRAKIPGLLNQTSRSLDQIPGYLNRIHELLNGTRGLFPGPSRRTLGAPDISSGTSDTGSLPPNLQPGYSPSPTHPPTGQYTLFPLPPTLPTPVVQLHPLLPDPSAPTPTPTSPLLNTSYTHSQNLSQEG

SEQ ID NO: 86 - protein, 332 aa, Artificial sequence
  Synthetic
SPAPPACDLRVLSKLLRDSHVLHSRLSQCPEVHPLPTPVLLPAVDFSLGEWKTQMEETKAQDILGAVTALLEGAQAARGQLGPTCLSSLLGQLSGQVRLLLGALQSLLGTQLPPQGRTTAHKDPNAIFLSFQHLLRGKVRFLMLVGGSTLCVRRAPPTTAVPSRTSLVLTLNELPNRTSGLLETNFTASARTTGSGLLKWQQGFRAKIPGLLNQTSRSLDQIPGYLNRIHELLNGTRGLFPGPSRRTLGAPDISSGTSDTGSLPPNLQPGYSPSPTHPPTGQYTLFPLPPTLPTPVVQLHPLLPDPSAPTPTPTSPLLNTSYTHSQNLSQEG

SEQ ID NO: 87 - protein, 332 aa, Artificial sequence
  Synthetic
SPAPPACDLRVLSKLLRDSHVLHSRLSQCPEVHPLPTPVLLPAVDFSLGEWKTQMEETKAQDILGAVTALLEGLMAARGQLGPTCLSSLLGQLSGQVRLLLGALQSLLGTQLPPQGRTTAHKDPNAIFLSFQHLLRGKVRFLMLVGGSTLCVRRAPPTTAVPSRTSLVLTLNELPNRTSGLLETNFTASARTTGSGLLKWQQGFRAKIPGLLNQTSRSLDQIPGYLNRIHELLNGTRGLFPGPSRRTLGAPDISSGTSDTGSLPPNLQPGYSPSPTHPPTGQYTLFPLPPTLPTPVVQLHPLLPDPSAPTPTPTSPLLNTSYTHSQNLSQEG

SEQ ID NO: 88 - protein, 332 aa, Artificial sequence
  Synthetic
SPAPPACDLRVLSKLLRDSHVLHSRLSQCPEVHPLPTPVLLPAVDFSLGEWKTQMEETKAQDILGAVTALLEGLKAARGQLGPTCLSSLLGQLSGQVRLLLGALQSLLGTQLPPQGRTTAHKDPNAIFLSFQHLLRGKVRFLMLVGGSTLCVRRAPPTTAVPSRTSLVLTLNELPNRTSGLLETNFTASARTTGSGLLKWQQGFRAKIPGLLNQTSRSLDQIPGYLNRIHELLNGTRGLFPGPSRRTLGAPDISSGTSDTGSLPPNLQPGYSPSPTHPPTGQYTLFPLPPTLPTPVVQLHPLLPDPSAPTPTPTSPLLNTSYTHSQNLSQEG

SEQ ID NO: 89 - protein, 332 aa, Artificial sequence
  Synthetic
SPAPPACDLRVLSKLLRDSHVLHSRLSQCPEVHPLPTPVLLPAVDFSLGEWKTQMEETKAQDILGAVTALLEGLLAARGQLGPTCLSSLLGQLSGQVRLLLGALQSLLGTQLPPQGRTTAHKDPNAIFLSFQHLLRGKVRFLMLVGGSTLCVRRAPPTTAVPSRTSLVLTLNELPNRTSGLLETNFTASARTTGSGLLKWQQGFRAKIPGLLNQTSRSLDQIPGYLNRIHELLNGTRGLFPGPSRRTLGAPDISSGTSDTGSLPPNLQPGYSPSPTHPPTGQYTLFPLPPTLPTPVVQLHPLLPDPSAPTPTPTSPLLNTSYTHSQNLSQEG

SEQ ID NO: 90 - protein, 332 aa, Artificial sequence
  Synthetic
SPAPPACDLRVLSKLLRDSHVLHSRLSQCPEVHPLPTPVLLPAVDFSLGEWKTQMEETKAQDILGAVTALLEGLQAARGQLGPTCLSSLLGQLSGQVRLLLGALQSLLGTQLPPQGRTTAHKDPNAIFLSFQHLLRGKVRFLMLVGGSTLCVRRAPPTTAVPSRTSLVLTLNELPNRTSGLLETNFTASARTTGSGLLKWQQGFRAKIPGLLNQTSRSLDQIPGYLNRIHELLNGTRGLFPGPSRRTLGAPDISSGTSDTGSLPPNLQPGYSPSPTHPPTGQYTLFPLPPTLPTPVVQLHPLLPDPSAPTPTPTSPLLNTSYTHSQNLSQEG

SEQ ID NO: 91 - protein, 332 aa, Artificial sequence
  Synthetic
SPAPPACDLRVLSKLLRDSHVLHSRLSQCPEVHPLPTPVLLPAVDFSLGEWKTQMEETKAQDILGAVTQLLEGVMAARGQLGPTCLSSLLGQLSGQVRLLLGALQSLLGTQLPPQGRTTAHKDPNAIFLSFQHLLRGKVRFLMLVGGSTLCVRRAPPTTAVPSRTSLVLTLNELPNRTSGLLETNFTASARTTGSGLLKWQQGFRAKIPGLLNQTSRSLDQIPGYLNRIHELLNGTRGLFPGPSRRTLGAPDISSGTSDTGSLPPNLQPGYSPSPTHPPTGQYTLFPLPPTLPTPVVQLHPLLPDPSAPTPTPTSPLLNTSYTHSQNLSQEG

SEQ ID NO: 92 - protein, 332 aa, Artificial sequence
  Synthetic
SPAPPACDLRVLSKLLRDSHVLHSRLSQCPEVHPLPTPVLLPAVDFSLGEWKTQMEETKAQDILGAVTQLLEGVKAARGQLGPTCLSSLLGQLSGQVRLLLGALQSLLGTQLPPQGRTTAHKDPNAIFLSFQHLLRGKVRFLMLVGGSTLCVRRAPPTTAVPSRTSLVLTLNELPNRTSGLLETNFTASARTTGSGLLKWQQGFRAKIPGLLNQTSRSLDQIPGYLNRIHELLNGTRGLFPGPSRRTLGAPDISSGTSDTGSLPPNLQPGYSPSPTHPPTGQYTLFPLPPTLPTPVVQLHPLLPDPSAPTPTPTSPLLNTSYTHSQNLSQEG

SEQ ID NO: 93 - protein, 332 aa, Artificial sequence
  Synthetic
SPAPPACDLRVLSKLLRDSHVLHSRLSQCPEVHPLPTPVLLPAVDFSLGEWKTQMEETKAQDILGAVTQLLEGVLAARGQLGPTCLSSLLGQLSGQVRLLLGALQSLLGTQLPPQGRTTAHKDPNAIFLSFQHLLRGKVRFLMLVGGSTLCVRRAPPTTAVPSRTSLVLTLNELPNRTSGLLETNFTASARTTGSGLLKWQQGFRAKIPGLLNQTSRSLDQIPGYLNRIHELLNGTRGLFPGPSRRTLGAPDISSGTSDTGSLPPNLQPGYSPSPTHPPTGQYTLFPLPPTLPTPVVQLHPLLPDPSAPTPTPTSPLLNTSYTHSQNLSQEG

SEQ ID NO: 94 - protein, 332 aa, Artificial sequence
  Synthetic
SPAPPACDLRVLSKLLRDSHVLHSRLSQCPEVHPLPTPVLLPAVDFSLGEWKTQMEETKAQDILGAVTQLLEGVQAARGQLGPTCLSSLLGQLSGQVRLLLGALQSLLGTQLPPQGRTTAHKDPNAIFLSFQHLLRGKVRFLMLVGGSTLCVRRAPPTTAVPSRTSLVLTLNELPNRTSGLLETNFTASARTTGSGLLKWQQGFRAKIPGLLNQTSRSLDQIPGYLNRIHELLNGTRGLFPGPSRRTLGAPDISSGTSDTGSLPPNLQPGYSPSPTHPPTGQYTLFPLPPTLPTPVVQLHPLLPDPSAPTPTPTSPLLNTSYTHSQNLSQEG

SEQ ID NO: 95 - protein, 332 aa, Artificial sequence
  Synthetic
SPAPPACDLRVLSKLLRDSHVLHSRLSQCPEVHPLPTPVLLPAVDFSLGEWKTQMEETKAQDILGAVTQLLEGAMAARGQLGPTCLSSLLGQLSGQVRLLLGALQSLLGTQLPPQGRTTAHKDPNAIFLSFQHLLRGKVRFLMLVGGSTLCVRRAPPTTAVPSRTSLVLTLNELPNRTSGLLETNFTASARTTGSGLLKWQQGFRAKIPGLLNQTSRSLDQIPGYLNRIHELLNGTRGLFPGPSRRTLGAPDISSGTSDTGSLPPNLQPGYSPSPTHPPTGQYTLFPLPPTLPTPVVQLHPLLPDPSAPTPTPTSPLLNTSYTHSQNLSQEG

SEQ ID NO: 96 - protein, 332 aa, Artificial sequence
  Synthetic
SPAPPACDLRVLSKLLRDSHVLHSRLSQCPEVHPLPTPVLLPAVDFSLGEWKTQMEETKAQDILGAVTQLLEGAKAARGQLGPTCLSSLLGQLSGQVRLLLGALQSLLGTQLPPQGRTTAHKDPNAIFLSFQHLLRGKVRFLMLVGGSTLCVRRAPPTTAVPSRTSLVLTLNELPNRTSGLLETNFTASARTTGSGLLKWQQGFRAKIPGLLNQTSRSLDQIPGYLNRIHELLNGTRGLFPGPSRRTLGAPDISSGTSDTGSLPPNLQPGYSPSPTHPPTGQYTLFPLPPTLPTPVVQLHPLLPDPSAPTPTPTSPLLNTSYTHSQNLSQEG

SEQ ID NO: 97 - protein, 332 aa, Artificial sequence
  Synthetic
SPAPPACDLRVLSKLLRDSHVLHSRLSQCPEVHPLPTPVLLPAVDFSLGEWKTQMEETKAQDILGAVTQLLEGALAARGQLGPTCLSSLLGQLSGQVRLLLGALQSLLGTQLPPQGRTTAHKDPNAIFLSFQHLLRGKVRFLMLVGGSTLCVRRAPPTTAVPSRTSLVLTLNELPNRTSGLLETNFTASARTTGSGLLKWQQGFRAKIPGLLNQTSRSLDQIPGYLNRIHELLNGTRGLFPGPSRRTLGAPDISSGTSDTGSLPPNLQPGYSPSPTHPPTGQYTLFPLPPTLPTPVVQLHPLLPDPSAPTPTPTSPLLNTSYTHSQNLSQEG

SEQ ID NO: 98 - protein, 332 aa, Artificial sequence
  Synthetic
SPAPPACDLRVLSKLLRDSHVLHSRLSQCPEVHPLPTPVLLPAVDFSLGEWKTQMEETKAQDILGAVTQLLEGAQAARGQLGPTCLSSLLGQLSGQVRLLLGALQSLLGTQLPPQGRTTAHKDPNAIFLSFQHLLRGKVRFLMLVGGSTLCVRRAPPTTAVPSRTSLVLTLNELPNRTSGLLETNFTASARTTGSGLLKWQQGFRAKIPGLLNQTSRSLDQIPGYLNRIHELLNGTRGLFPGPSRRTLGAPDISSGTSDTGSLPPNLQPGYSPSPTHPPTGQYTLFPLPPTLPTPVVQLHPLLPDPSAPTPTPTSPLLNTSYTHSQNLSQEG

SEQ ID NO: 99 - protein, 332 aa, Artificial sequence
  Synthetic
SPAPPACDLRVLSKLLRDSHVLHSRLSQCPEVHPLPTPVLLPAVDFSLGEWKTQMEETKAQDILGAVTQLLEGLMAARGQLGPTCLSSLLGQLSGQVRLLLGALQSLLGTQLPPQGRTTAHKDPNAIFLSFQHLLRGKVRFLMLVGGSTLCVRRAPPTTAVPSRTSLVLTLNELPNRTSGLLETNFTASARTTGSGLLKWQQGFRAKIPGLLNQTSRSLDQIPGYLNRIHELLNGTRGLFPGPSRRTLGAPDISSGTSDTGSLPPNLQPGYSPSPTHPPTGQYTLFPLPPTLPTPVVQLHPLLPDPSAPTPTPTSPLLNTSYTHSQNLSQEG

SEQ ID NO: 100 - protein, 332 aa, Artificial sequence
  Synthetic
SPAPPACDLRVLSKLLRDSHVLHSRLSQCPEVHPLPTPVLLPAVDFSLGEWKTQMEETKAQDILGAVTQLLEGLKAARGQLGPTCLSSLLGQLSGQVRLLLGALQSLLGTQLPPQGRTTAHKDPNAIFLSFQHLLRGKVRFLMLVGGSTLCVRRAPPTTAVPSRTSLVLTLNELPNRTSGLLETNFTASARTTGSGLLKWQQGFRAKIPGLLNQTSRSLDQIPGYLNRIHELLNGTRGLFPGPSRRTLGAPDISSGTSDTGSLPPNLQPGYSPSPTHPPTGQYTLFPLPPTLPTPVVQLHPLLPDPSAPTPTPTSPLLNTSYTHSQNLSQEG

SEQ ID NO: 101 - protein, 332 aa, Artificial sequence
  Synthetic
SPAPPACDLRVLSKLLRDSHVLHSRLSQCPEVHPLPTPVLLPAVDFSLGEWKTQMEETKAQDILGAVTQLLEGLLAARGQLGPTCLSSLLGQLSGQVRLLLGALQSLLGTQLPPQGRTTAHKDPNAIFLSFQHLLRGKVRFLMLVGGSTLCVRRAPPTTAVPSRTSLVLTLNELPNRTSGLLETNFTASARTTGSGLLKWQQGFRAKIPGLLNQTSRSLDQIPGYLNRIHELLNGTRGLFPGPSRRTLGAPDISSGTSDTGSLPPNLQPGYSPSPTHPPTGQYTLFPLPPTLPTPVVQLHPLLPDPSAPTPTPTSPLLNTSYTHSQNLSQEG

SEQ ID NO: 102 - protein, 332 aa, Artificial sequence
  Synthetic
SPAPPACDLRVLSKLLRDSHVLHSRLSQCPEVHPLPTPVLLPAVDFSLGEWKTQMEETKAQDILGAVTQLLEGLQAARGQLGPTCLSSLLGQLSGQVRLLLGALQSLLGTQLPPQGRTTAHKDPNAIFLSFQHLLRGKVRFLMLVGGSTLCVRRAPPTTAVPSRTSLVLTLNELPNRTSGLLETNFTASARTTGSGLLKWQQGFRAKIPGLLNQTSRSLDQIPGYLNRIHELLNGTRGLFPGPSRRTLGAPDISSGTSDTGSLPPNLQPGYSPSPTHPPTGQYTLFPLPPTLPTPVVQLHPLLPDPSAPTPTPTSPLLNTSYTHSQNLSQEG

SEQ ID NO: 103 - protein, 332 aa, Artificial sequence
  Synthetic
SPAPPACDLRVLSKLLRDSHVLHSRLSQCPEVHPLPTPVLLPAVDFSLGEWKTQMEETKAQDILGAVTQLLKGVMAARGQLGPTCLSSLLGQLSGQVRLLLGALQSLLGTQLPPQGRTTAHKDPNAIFLSFQHLLRGKVRFLMLVGGSTLCVRRAPPTTAVPSRTSLVLTLNELPNRTSGLLETNFTASARTTGSGLLKWQQGFRAKIPGLLNQTSRSLDQIPGYLNRIHELLNGTRGLFPGPSRRTLGAPDISSGTSDTGSLPPNLQPGYSPSPTHPPTGQYTLFPLPPTLPTPVVQLHPLLPDPSAPTPTPTSPLLNTSYTHSQNLSQEG

SEQ ID NO: 104 - protein, 332 aa, Artificial sequence
  Synthetic
SPAPPACDLRVLSKLLRDSHVLHSRLSQCPEVHPLPTPVLLPAVDFSLGEWKTQMEETKAQDILGAVTQLLKGVKAARGQLGPTCLSSLLGQLSGQVRLLLGALQSLLGTQLPPQGRTTAHKDPNAIFLSFQHLLRGKVRFLMLVGGSTLCVRRAPPTTAVPSRTSLVLTLNELPNRTSGLLETNFTASARTTGSGLLKWQQGFRAKIPGLLNQTSRSLDQIPGYLNRIHELLNGTRGLFPGPSRRTLGAPDISSGTSDTGSLPPNLQPGYSPSPTHPPTGQYTLFPLPPTLPTPVVQLHPLLPDPSAPTPTPTSPLLNTSYTHSQNLSQEG

SEQ ID NO: 105 - protein, 332 aa, Artificial sequence
  Synthetic
SPAPPACDLRVLSKLLRDSHVLHSRLSQCPEVHPLPTPVLLPAVDFSLGEWKTQMEETKAQDILGAVTQLLKGVLAARGQLGPTCLSSLLGQLSGQVRLLLGALQSLLGTQLPPQGRTTAHKDPNAIFLSFQHLLRGKVRFLMLVGGSTLCVRRAPPTTAVPSRTSLVLTLNELPNRTSGLLETNFTASARTTGSGLLKWQQGFRAKIPGLLNQTSRSLDQIPGYLNRIHELLNGTRGLFPGPSRRTLGAPDISSGTSDTGSLPPNLQPGYSPSPTHPPTGQYTLFPLPPTLPTPVVQLHPLLPDPSAPTPTPTSPLLNTSYTHSQNLSQEG

SEQ ID NO: 106 - protein, 332 aa, Artificial sequence
  Synthetic
SPAPPACDLRVLSKLLRDSHVLHSRLSQCPEVHPLPTPVLLPAVDFSLGEWKTQMEETKAQDILGAVTQLLKGAMAARGQLGPTCLSSLLGQLSGQVRLLLGALQSLLGTQLPPQGRTTAHKDPNAIFLSFQHLLRGKVRFLMLVGGSTLCVRRAPPTTAVPSRTSLVLTLNELPNRTSGLLETNFTASARTTGSGLLKWQQGFRAKIPGLLNQTSRSLDQIPGYLNRIHELLNGTRGLFPGPSRRTLGAPDISSGTSDTGSLPPNLQPGYSPSPTHPPTGQYTLFPLPPTLPTPVVQLHPLLPDPSAPTPTPTSPLLNTSYTHSQNLSQEG

SEQ ID NO: 107 - protein, 332 aa, Artificial sequence
  Synthetic
SPAPPACDLRVLSKLLRDSHVLHSRLSQCPEVHPLPTPVLLPAVDFSLGEWKTQMEETKAQDILGAVTQLLKGAKAARGQLGPTCLSSLLGQLSGQVRLLLGALQSLLGTQLPPQGRTTAHKDPNAIFLSFQHLLRGKVRFLMLVGGSTLCVRRAPPTTAVPSRTSLVLTLNELPNRTSGLLETNFTASARTTGSGLLKWQQGFRAKIPGLLNQTSRSLDQIPGYLNRIHELLNGTRGLFPGPSRRTLGAPDISSGTSDTGSLPPNLQPGYSPSPTHPPTGQYTLFPLPPTLPTPVVQLHPLLPDPSAPTPTPTSPLLNTSYTHSQNLSQEG

SEQ ID NO: 108 - protein, 332 aa, Artificial sequence
  Synthetic
SPAPPACDLRVLSKLLRDSHVLHSRLSQCPEVHPLPTPVLLPAVDFSLGEWKTQMEETKAQDILGAVTQLLKGALAARGQLGPTCLSSLLGQLSGQVRLLLGALQSLLGTQLPPQGRTTAHKDPNAIFLSFQHLLRGKVRFLMLVGGSTLCVRRAPPTTAVPSRTSLVLTLNELPNRTSGLLETNFTASARTTGSGLLKWQQGFRAKIPGLLNQTSRSLDQIPGYLNRIHELLNGTRGLFPGPSRRTLGAPDISSGTSDTGSLPPNLQPGYSPSPTHPPTGQYTLFPLPPTLPTPVVQLHPLLPDPSAPTPTPTSPLLNTSYTHSQNLSQEG

SEQ ID NO: 109 - protein, 332 aa, Artificial sequence
  Synthetic
SPAPPACDLRVLSKLLRDSHVLHSRLSQCPEVHPLPTPVLLPAVDFSLGEWKTQMEETKAQDILGAVTLLLEGVMAARGQLGPTCLSSLLGQLSGQVKLILGALESLLGTQLPPQGRTTAHKDPNAIFLSFQHLLRGKVRFLMLVGGSTLCVRRAPPTTAVPSRTSLVLTLNELPNRTSGLLETNFTASARTTGSGLLKWQQGFRAKIPGLLNQTSRSLDQIPGYLNRIHELLNGTRGLFPGPSRRTLGAPDISSGTSDTGSLPPNLQPGYSPSPTHPPTGQYTLFPLPPTLPTPVVQLHPLLPDPSAPTPTPTSPLLNTSYTHSQNLSQEG

SEQ ID NO: 110 - protein, 332 aa, Artificial sequence
  Synthetic
SPAPPACDLRVLSKLLRDSHVLHSRLSQCPEVHPLPTPVLLPAVDFSLGEWKTQMEETKAQDILGAVTLLLEGVMAARGQLGPTCLSSLLGQLSGQVKVLLGALESLLGTQLPPQGRTTAHKDPNAIFLSFQHLLRGKVRFLMLVGGSTLCVRRAPPTTAVPSRTSLVLTLNELPNRTSGLLETNFTASARTTGSGLLKWQQGFRAKIPGLLNQTSRSLDQIPGYLNRIHELLNGTRGLFPGPSRRTLGAPDISSGTSDTGSLPPNLQPGYSPSPTHPPTGQYTLFPLPPTLPTPVVQLHPLLPDPSAPTPTPTSPLLNTSYTHSQNLSQEG

SEQ ID NO: 111 - protein, 332 aa, Artificial sequence
  Synthetic
SPAPPACDLRVLSKLLRDSHVLHSRLSQCPEVHPLPTPVLLPAVDFSLGEWKTQMEETKAQDILGAVTLLLEGVMAARGQLGPTCLSSLLGQLSGQVKVLLGSLESLLGTQLPPQGRTTAHKDPNAIFLSFQHLLRGKVRFLMLVGGSTLCVRRAPPTTAVPSRTSLVLTLNELPNRTSGLLETNFTASARTTGSGLLKWQQGFRAKIPGLLNQTSRSLDQIPGYLNRIHELLNGTRGLFPGPSRRTLGAPDISSGTSDTGSLPPNLQPGYSPSPTHPPTGQYTLFPLPPTLPTPVVQLHPLLPDPSAPTPTPTSPLLNTSYTHSQNLSQEG

SEQ ID NO: 112 - protein, 332 aa, Artificial sequence
  Synthetic
SPAPPACDLRVLSKLLRDSHVLHSRLSQCPEVHPLPTPVLLPAVDFSLGEWKTQMEETKAQDILGAVTLLLEGVMAARGQLGPTCLSSLLGQLSGQVKVILGALESLLGTQLPPQGRTTAHKDPNAIFLSFQHLLRGKVRFLMLVGGSTLCVRRAPPTTAVPSRTSLVLTLNELPNRTSGLLETNFTASARTTGSGLLKWQQGFRAKIPGLLNQTSRSLDQIPGYLNRIHELLNGTRGLFPGPSRRTLGAPDISSGTSDTGSLPPNLQPGYSPSPTHPPTGQYTLFPLPPTLPTPVVQLHPLLPDPSAPTPTPTSPLLNTSYTHSQNLSQEG

SEQ ID NO: 113 - protein, 332 aa, Artificial sequence
  Synthetic
SPAPPACDLRVLSKLLRDSHVLHSRLSQCPEVHPLPTPVLLPAVDFSLGEWKTQMEETKAQDILGAVTLLLEGVMAARGQLGPTCLSSLLGQLSGQVKVILGSLESLLGTQLPPQGRTTAHKDPNAIFLSFQHLLRGKVRFLMLVGGSTLCVRRAPPTTAVPSRTSLVLTLNELPNRTSGLLETNFTASARTTGSGLLKWQQGFRAKIPGLLNQTSRSLDQIPGYLNRIHELLNGTRGLFPGPSRRTLGAPDISSGTSDTGSLPPNLQPGYSPSPTHPPTGQYTLFPLPPTLPTPVVQLHPLLPDPSAPTPTPTSPLLNTSYTHSQNLSQEG

SEQ ID NO: 114 - protein, 332 aa, Artificial sequence
  Synthetic
SPAPPACDLRVLSKLLRDSHVLHSRLSQCPEVHPLPTPVLLPAVDFSLGEWKTQMEETKAQDILGAVTLLLEGVMAARGQLGPTCLSSLLGQLSGQVQVLLGALESLLGTQLPPQGRTTAHKDPNAIFLSFQHLLRGKVRFLMLVGGSTLCVRRAPPTTAVPSRTSLVLTLNELPNRTSGLLETNFTASARTTGSGLLKWQQGFRAKIPGLLNQTSRSLDQIPGYLNRIHELLNGTRGLFPGPSRRTLGAPDISSGTSDTGSLPPNLQPGYSPSPTHPPTGQYTLFPLPPTLPTPVVQLHPLLPDPSAPTPTPTSPLLNTSYTHSQNLSQEG

SEQ ID NO: 115 - protein, 332 aa, Artificial sequence
  Synthetic
SPAPPACDLRVLSKLLRDSHVLHSRLSQCPEVHPLPTPVLLPAVDFSLGEWKTQMEETKAQDILGAVTLLLEGVMAARGQLGPTCLSSLLGQLSGQVQVLLGSLESLLGTQLPPQGRTTAHKDPNAIFLSFQHLLRGKVRFLMLVGGSTLCVRRAPPTTAVPSRTSLVLTLNELPNRTSGLLETNFTASARTTGSGLLKWQQGFRAKIPGLLNQTSRSLDQIPGYLNRIHELLNGTRGLFPGPSRRTLGAPDISSGTSDTGSLPPNLQPGYSPSPTHPPTGQYTLFPLPPTLPTPVVQLHPLLPDPSAPTPTPTSPLLNTSYTHSQNLSQEG

SEQ ID NO: 116 - protein, 332 aa, Artificial sequence
  Synthetic
SPAPPACDLRVLSKLLRDSHVLHSRLSQCPEVHPLPTPVLLPAVDFSLGEWKTQMEETKAQDILGAVTLLLEGVMAARGQLGPTCLSSLLGQLSGQVQVILGALESLLGTQLPPQGRTTAHKDPNAIFLSFQHLLRGKVRFLMLVGGSTLCVRRAPPTTAVPSRTSLVLTLNELPNRTSGLLETNFTASARTTGSGLLKWQQGFRAKIPGLLNQTSRSLDQIPGYLNRIHELLNGTRGLFPGPSRRTLGAPDISSGTSDTGSLPPNLQPGYSPSPTHPPTGQYTLFPLPPTLPTPVVQLHPLLPDPSAPTPTPTSPLLNTSYTHSQNLSQEG

SEQ ID NO: 117 - protein, 332 aa, Artificial sequence
  Synthetic
SPAPPACDLRVLSKLLRDSHVLHSRLSQCPEVHPLPTPVLLPAVDFSLGEWKTQMEETKAQDILGAVTLLLEGVMAARGQLGPTCLSSLLGQLSGQIKLILGALESLLGTQLPPQGRTTAHKDPNAIFLSFQHLLRGKVRFLMLVGGSTLCVRRAPPTTAVPSRTSLVLTLNELPNRTSGLLETNFTASARTTGSGLLKWQQGFRAKIPGLLNQTSRSLDQIPGYLNRIHELLNGTRGLFPGPSRRTLGAPDISSGTSDTGSLPPNLQPGYSPSPTHPPTGQYTLFPLPPTLPTPVVQLHPLLPDPSAPTPTPTSPLLNTSYTHSQNLSQEG

SEQ ID NO: 118 - protein, 332 aa, Artificial sequence
  Synthetic
SPAPPACDLRVLSKLLRDSHVLHSRLSQCPEVHPLPTPVLLPAVDFSLGEWKTQMEETKAQDILGAVTLLLEGVMAARGQLGPTCLSSLLGQLSGQIKVLLGALESLLGTQLPPQGRTTAHKDPNAIFLSFQHLLRGKVRFLMLVGGSTLCVRRAPPTTAVPSRTSLVLTLNELPNRTSGLLETNFTASARTTGSGLLKWQQGFRAKIPGLLNQTSRSLDQIPGYLNRIHELLNGTRGLFPGPSRRTLGAPDISSGTSDTGSLPPNLQPGYSPSPTHPPTGQYTLFPLPPTLPTPVVQLHPLLPDPSAPTPTPTSPLLNTSYTHSQNLSQEG

SEQ ID NO: 119 - protein, 332 aa, Artificial sequence
  Synthetic
SPAPPACDLRVLSKLLRDSHVLHSRLSQCPEVHPLPTPVLLPAVDFSLGEWKTQMEETKAQDILGAVTLLLEGVMAARGQLGPTCLSSLLGQLSGQIKVLLGSLESLLGTQLPPQGRTTAHKDPNAIFLSFQHLLRGKVRFLMLVGGSTLCVRRAPPTTAVPSRTSLVLTLNELPNRTSGLLETNFTASARTTGSGLLKWQQGFRAKIPGLLNQTSRSLDQIPGYLNRIHELLNGTRGLFPGPSRRTLGAPDISSGTSDTGSLPPNLQPGYSPSPTHPPTGQYTLFPLPPTLPTPVVQLHPLLPDPSAPTPTPTSPLLNTSYTHSQNLSQEG

SEQ ID NO: 120 - protein, 332 aa, Artificial sequence
  Synthetic
SPAPPACDLRVLSKLLRDSHVLHSRLSQCPEVHPLPTPVLLPAVDFSLGEWKTQMEETKAQDILGAVTLLLEGVMAARGQLGPTCLSSLLGQLSGQIKVILGALESLLGTQLPPQGRTTAHKDPNAIFLSFQHLLRGKVRFLMLVGGSTLCVRRAPPTTAVPSRTSLVLTLNELPNRTSGLLETNFTASARTTGSGLLKWQQGFRAKIPGLLNQTSRSLDQIPGYLNRIHELLNGTRGLFPGPSRRTLGAPDISSGTSDTGSLPPNLQPGYSPSPTHPPTGQYTLFPLPPTLPTPVVQLHPLLPDPSAPTPTPTSPLLNTSYTHSQNLSQEG

SEQ ID NO: 121 - protein, 332 aa, Artificial sequence
  Synthetic
SPAPPACDLRVLSKLLRDSHVLHSRLSQCPEVHPLPTPVLLPAVDFSLGEWKTQMEETKAQDILGAVTLLLEGVMAARGQLGPTCLSSLLGQLSGQIKVILGSLESLLGTQLPPQGRTTAHKDPNAIFLSFQHLLRGKVRFLMLVGGSTLCVRRAPPTTAVPSRTSLVLTLNELPNRTSGLLETNFTASARTTGSGLLKWQQGFRAKIPGLLNQTSRSLDQIPGYLNRIHELLNGTRGLFPGPSRRTLGAPDISSGTSDTGSLPPNLQPGYSPSPTHPPTGQYTLFPLPPTLPTPVVQLHPLLPDPSAPTPTPTSPLLNTSYTHSQNLSQEG

SEQ ID NO: 122 - protein, 332 aa, Artificial sequence
  Synthetic
SPAPPACDLRVLSKLLRDSHVLHSRLSQCPEVHPLPTPVLLPAVDFSLGEWKTQMEETKAQDILGAVTLLLEGVMAARGQLGPTCLSSLLGQLSGQIQVLLGALESLLGTQLPPQGRTTAHKDPNAIFLSFQHLLRGKVRFLMLVGGSTLCVRRAPPTTAVPSRTSLVLTLNELPNRTSGLLETNFTASARTTGSGLLKWQQGFRAKIPGLLNQTSRSLDQIPGYLNRIHELLNGTRGLFPGPSRRTLGAPDISSGTSDTGSLPPNLQPGYSPSPTHPPTGQYTLFPLPPTLPTPVVQLHPLLPDPSAPTPTPTSPLLNTSYTHSQNLSQEG

SEQ ID NO: 123 - protein, 332 aa, Artificial sequence
  Synthetic
SPAPPACDLRVLSKLLRDSHVLHSRLSQCPEVHPLPTPVLLPAVDFSLGEWKTQMEETKAQDILGAVTLLLEGVMAARGQLGPTCLSSLLGQLSGQIQVLLGSLESLLGTQLPPQGRTTAHKDPNAIFLSFQHLLRGKVRFLMLVGGSTLCVRRAPPTTAVPSRTSLVLTLNELPNRTSGLLETNFTASARTTGSGLLKWQQGFRAKIPGLLNQTSRSLDQIPGYLNRIHELLNGTRGLFPGPSRRTLGAPDISSGTSDTGSLPPNLQPGYSPSPTHPPTGQYTLFPLPPTLPTPVVQLHPLLPDPSAPTPTPTSPLLNTSYTHSQNLSQEG

SEQ ID NO: 124 - protein, 332 aa, Artificial sequence
  Synthetic
SPAPPACDLRVLSKLLRDSHVLHSRLSQCPEVHPLPTPVLLPAVDFSLGEWKTQMEETKAQDILGAVTLLLEGVMAARGQLGPTCLSSLLGQLSGQIQVILGALESLLGTQLPPQGRTTAHKDPNAIFLSFQHLLRGKVRFLMLVGGSTLCVRRAPPTTAVPSRTSLVLTLNELPNRTSGLLETNFTASARTTGSGLLKWQQGFRAKIPGLLNQTSRSLDQIPGYLNRIHELLNGTRGLFPGPSRRTLGAPDISSGTSDTGSLPPNLQPGYSPSPTHPPTGQYTLFPLPPTLPTPVVQLHPLLPDPSAPTPTPTSPLLNTSYTHSQNLSQEG

SEQ ID NO: 125 - protein, 332 aa, Artificial sequence
  Synthetic
SPAPPACDLRVLSKLLRDSHVLHSRLSQCPEVHPLPTPVLLPAVDFSLGEWKTQMEETKAQDILGAVTLLLEGVMAARGQLGPTCLSSLLGQLSGQTRLLLGALESLLGTQLPPQGRTTAHKDPNAIFLSFQHLLRGKVRFLMLVGGSTLCVRRAPPTTAVPSRTSLVLTLNELPNRTSGLLETNFTASARTTGSGLLKWQQGFRAKIPGLLNQTSRSLDQIPGYLNRIHELLNGTRGLFPGPSRRTLGAPDISSGTSDTGSLPPNLQPGYSPSPTHPPTGQYTLFPLPPTLPTPVVQLHPLLPDPSAPTPTPTSPLLNTSYTHSQNLSQEG

SEQ ID NO: 126 - protein, 332 aa, Artificial sequence
  Synthetic
SPAPPACDLRVLSKLLRDSHVLHSRLSQCPEVHPLPTPVLLPAVDFSLGEWKTQMEETKAQDILGAVTLLLEGVMAARGQLGPTCLSSLLGQLSGQTRLLLGSLESLLGTQLPPQGRTTAHKDPNAIFLSFQHLLRGKVRFLMLVGGSTLCVRRAPPTTAVPSRTSLVLTLNELPNRTSGLLETNFTASARTTGSGLLKWQQGFRAKIPGLLNQTSRSLDQIPGYLNRIHELLNGTRGLFPGPSRRTLGAPDISSGTSDTGSLPPNLQPGYSPSPTHPPTGQYTLFPLPPTLPTPVVQLHPLLPDPSAPTPTPTSPLLNTSYTHSQNLSQEG

SEQ ID NO: 127 - protein, 332 aa, Artificial sequence
  Synthetic
SPAPPACDLRVLSKLLRDSHVLHSRLSQCPEVHPLPTPVLLPAVDFSLGEWKTQMEETKAQDILGAVTLLLEGVMAARGQLGPTCLSSLLGQLSGQTRLILGALESLLGTQLPPQGRTTAHKDPNAIFLSFQHLLRGKVRFLMLVGGSTLCVRRAPPTTAVPSRTSLVLTLNELPNRTSGLLETNFTASARTTGSGLLKWQQGFRAKIPGLLNQTSRSLDQIPGYLNRIHELLNGTRGLFPGPSRRTLGAPDISSGTSDTGSLPPNLQPGYSPSPTHPPTGQYTLFPLPPTLPTPVVQLHPLLPDPSAPTPTPTSPLLNTSYTHSQNLSQEG

SEQ ID NO: 128 - protein, 332 aa, Artificial sequence
  Synthetic
SPAPPACDLRVLSKLLRDSHVLHSRLSQCPEVHPLPTPVLLPAVDFSLGEWKTQMEETKAQDILGAVTLLLEGVMAARGQLGPTCLSSLLGQLSGQTRLILGSLESLLGTQLPPQGRTTAHKDPNAIFLSFQHLLRGKVRFLMLVGGSTLCVRRAPPTTAVPSRTSLVLTLNELPNRTSGLLETNFTASARTTGSGLLKWQQGFRAKIPGLLNQTSRSLDQIPGYLNRIHELLNGTRGLFPGPSRRTLGAPDISSGTSDTGSLPPNLQPGYSPSPTHPPTGQYTLFPLPPTLPTPVVQLHPLLPDPSAPTPTPTSPLLNTSYTHSQNLSQEG

SEQ ID NO: 129 - protein, 332 aa, Artificial sequence
  Synthetic
SPAPPACDLRVLSKLLRDSHVLHSRLSQCPEVHPLPTPVLLPAVDFSLGEWKTQMEETKAQDILGAVTLLLEGVMAARGQLGPTCLSSLLGQLSGQTRILLGALESLLGTQLPPQGRTTAHKDPNAIFLSFQHLLRGKVRFLMLVGGSTLCVRRAPPTTAVPSRTSLVLTLNELPNRTSGLLETNFTASARTTGSGLLKWQQGFRAKIPGLLNQTSRSLDQIPGYLNRIHELLNGTRGLFPGPSRRTLGAPDISSGTSDTGSLPPNLQPGYSPSPTHPPTGQYTLFPLPPTLPTPVVQLHPLLPDPSAPTPTPTSPLLNTSYTHSQNLSQEG

SEQ ID NO: 130 - protein, 332 aa, Artificial sequence
  Synthetic
SPAPPACDLRVLSKLLRDSHVLHSRLSQCPEVHPLPTPVLLPAVDFSLGEWKTQMEETKAQDILGAVTLLLEGVMAARGQLGPTCLSSLLGQLSGQTRILLGSLESLLGTQLPPQGRTTAHKDPNAIFLSFQHLLRGKVRFLMLVGGSTLCVRRAPPTTAVPSRTSLVLTLNELPNRTSGLLETNFTASARTTGSGLLKWQQGFRAKIPGLLNQTSRSLDQIPGYLNRIHELLNGTRGLFPGPSRRTLGAPDISSGTSDTGSLPPNLQPGYSPSPTHPPTGQYTLFPLPPTLPTPVVQLHPLLPDPSAPTPTPTSPLLNTSYTHSQNLSQEG

SEQ ID NO: 131 - protein, 332 aa, Artificial sequence
  Synthetic
SPAPPACDLRVLSKLLRDSHVLHSRLSQCPEVHPLPTPVLLPAVDFSLGEWKTQMEETKAQDILGAVTLLLEGVMAARGQLGPTCLSSLLGQLSGQTRIILGALESLLGTQLPPQGRTTAHKDPNAIFLSFQHLLRGKVRFLMLVGGSTLCVRRAPPTTAVPSRTSLVLTLNELPNRTSGLLETNFTASARTTGSGLLKWQQGFRAKIPGLLNQTSRSLDQIPGYLNRIHELLNGTRGLFPGPSRRTLGAPDISSGTSDTGSLPPNLQPGYSPSPTHPPTGQYTLFPLPPTLPTPVVQLHPLLPDPSAPTPTPTSPLLNTSYTHSQNLSQEG

SEQ ID NO: 132 - protein, 332 aa, Artificial sequence
  Synthetic
SPAPPACDLRVLSKLLRDSHVLHSRLSQCPEVHPLPTPVLLPAVDFSLGEWKTQMEETKAQDILGAVTLLLEGVMAARGQLGPTCLSSLLGQLSGQTRIILGSLESLLGTQLPPQGRTTAHKDPNAIFLSFQHLLRGKVRFLMLVGGSTLCVRRAPPTTAVPSRTSLVLTLNELPNRTSGLLETNFTASARTTGSGLLKWQQGFRAKIPGLLNQTSRSLDQIPGYLNRIHELLNGTRGLFPGPSRRTLGAPDISSGTSDTGSLPPNLQPGYSPSPTHPPTGQYTLFPLPPTLPTPVVQLHPLLPDPSAPTPTPTSPLLNTSYTHSQNLSQEG

SEQ ID NO: 133 - protein, 332 aa, Artificial sequence
  Synthetic
SPAPPACDLRVLSKLLRDSHVLHSRLSQCPEVHPLPTPVLLPAVDFSLGEWKTQMEETKAQDILGAVTLLLEGVMAARGQLGPTCLSSLLGQLSGQTRVLLGALESLLGTQLPPQGRTTAHKDPNAIFLSFQHLLRGKVRFLMLVGGSTLCVRRAPPTTAVPSRTSLVLTLNELPNRTSGLLETNFTASARTTGSGLLKWQQGFRAKIPGLLNQTSRSLDQIPGYLNRIHELLNGTRGLFPGPSRRTLGAPDISSGTSDTGSLPPNLQPGYSPSPTHPPTGQYTLFPLPPTLPTPVVQLHPLLPDPSAPTPTPTSPLLNTSYTHSQNLSQEG

SEQ ID NO: 134 - protein, 332 aa, Artificial sequence
  Synthetic
SPAPPACDLRVLSKLLRDSHVLHSRLSQCPEVHPLPTPVLLPAVDFSLGEWKTQMEETKAQDILGAVTLLLEGVMAARGQLGPTCLSSLLGQLSGQTRVLLGSLESLLGTQLPPQGRTTAHKDPNAIFLSFQHLLRGKVRFLMLVGGSTLCVRRAPPTTAVPSRTSLVLTLNELPNRTSGLLETNFTASARTTGSGLLKWQQGFRAKIPGLLNQTSRSLDQIPGYLNRIHELLNGTRGLFPGPSRRTLGAPDISSGTSDTGSLPPNLQPGYSPSPTHPPTGQYTLFPLPPTLPTPVVQLHPLLPDPSAPTPTPTSPLLNTSYTHSQNLSQEG

SEQ ID NO: 135 - protein, 332 aa, Artificial sequence
  Synthetic
SPAPPACDLRVLSKLLRDSHVLHSRLSQCPEVHPLPTPVLLPAVDFSLGEWKTQMEETKAQDILGAVTLLLEGVMAARGQLGPTCLSSLLGQLSGQTRVILGALESLLGTQLPPQGRTTAHKDPNAIFLSFQHLLRGKVRFLMLVGGSTLCVRRAPPTTAVPSRTSLVLTLNELPNRTSGLLETNFTASARTTGSGLLKWQQGFRAKIPGLLNQTSRSLDQIPGYLNRIHELLNGTRGLFPGPSRRTLGAPDISSGTSDTGSLPPNLQPGYSPSPTHPPTGQYTLFPLPPTLPTPVVQLHPLLPDPSAPTPTPTSPLLNTSYTHSQNLSQEG

SEQ ID NO: 136 - protein, 332 aa, Artificial sequence
  Synthetic
SPAPPACDLRVLSKLLRDSHVLHSRLSQCPEVHPLPTPVLLPAVDFSLGEWKTQMEETKAQDILGAVTLLLEGVMAARGQLGPTCLSSLLGQLSGQTRVILGSLESLLGTQLPPQGRTTAHKDPNAIFLSFQHLLRGKVRFLMLVGGSTLCVRRAPPTTAVPSRTSLVLTLNELPNRTSGLLETNFTASARTTGSGLLKWQQGFRAKIPGLLNQTSRSLDQIPGYLNRIHELLNGTRGLFPGPSRRTLGAPDISSGTSDTGSLPPNLQPGYSPSPTHPPTGQYTLFPLPPTLPTPVVQLHPLLPDPSAPTPTPTSPLLNTSYTHSQNLSQEG

SEQ ID NO: 137 - protein, 332 aa, Artificial sequence
  Synthetic
SPAPPACDLRVLSKLLRDSHVLHSRLSQCPEVHPLPTPVLLPAVDFSLGEWKTQMEETKAQDILGAVTLLLEGVMAARGQLGPTCLSSLLGQLSGQTKLLLGALESLLGTQLPPQGRTTAHKDPNAIFLSFQHLLRGKVRFLMLVGGSTLCVRRAPPTTAVPSRTSLVLTLNELPNRTSGLLETNFTASARTTGSGLLKWQQGFRAKIPGLLNQTSRSLDQIPGYLNRIHELLNGTRGLFPGPSRRTLGAPDISSGTSDTGSLPPNLQPGYSPSPTHPPTGQYTLFPLPPTLPTPVVQLHPLLPDPSAPTPTPTSPLLNTSYTHSQNLSQEG

SEQ ID NO: 138 - protein, 332 aa, Artificial sequence
  Synthetic
SPAPPACDLRVLSKLLRDSHVLHSRLSQCPEVHPLPTPVLLPAVDFSLGEWKTQMEETKAQDILGAVTLLLEGVMAARGQLGPTCLSSLLGQLSGQTKLLLGSLESLLGTQLPPQGRTTAHKDPNAIFLSFQHLLRGKVRFLMLVGGSTLCVRRAPPTTAVPSRTSLVLTLNELPNRTSGLLETNFTASARTTGSGLLKWQQGFRAKIPGLLNQTSRSLDQIPGYLNRIHELLNGTRGLFPGPSRRTLGAPDISSGTSDTGSLPPNLQPGYSPSPTHPPTGQYTLFPLPPTLPTPVVQLHPLLPDPSAPTPTPTSPLLNTSYTHSQNLSQEG

SEQ ID NO: 139 - protein, 332 aa, Artificial sequence
  Synthetic
SPAPPACDLRVLSKLLRDSHVLHSRLSQCPEVHPLPTPVLLPAVDFSLGEWKTQMEETKAQDILGAVTLLLEGVMAARGQLGPTCLSSLLGQLSGQTKLILGALESLLGTQLPPQGRTTAHKDPNAIFLSFQHLLRGKVRFLMLVGGSTLCVRRAPPTTAVPSRTSLVLTLNELPNRTSGLLETNFTASARTTGSGLLKWQQGFRAKIPGLLNQTSRSLDQIPGYLNRIHELLNGTRGLFPGPSRRTLGAPDISSGTSDTGSLPPNLQPGYSPSPTHPPTGQYTLFPLPPTLPTPVVQLHPLLPDPSAPTPTPTSPLLNTSYTHSQNLSQEG

SEQ ID NO: 140 - protein, 332 aa, Artificial sequence
  Synthetic
SPAPPACDLRVLSKLLRDSHVLHSRLSQCPEVHPLPTPVLLPAVDFSLGEWKTQMEETKAQDILGAVTLLLEGVMAARGQLGPTCLSSLLGQLSGQTKLILGSLESLLGTQLPPQGRTTAHKDPNAIFLSFQHLLRGKVRFLMLVGGSTLCVRRAPPTTAVPSRTSLVLTLNELPNRTSGLLETNFTASARTTGSGLLKWQQGFRAKIPGLLNQTSRSLDQIPGYLNRIHELLNGTRGLFPGPSRRTLGAPDISSGTSDTGSLPPNLQPGYSPSPTHPPTGQYTLFPLPPTLPTPVVQLHPLLPDPSAPTPTPTSPLLNTSYTHSQNLSQEG

SEQ ID NO: 141 - protein, 332 aa, Artificial sequence
  Synthetic
SPAPPACDLRVLSKLLRDSHVLHSRLSQCPEVHPLPTPVLLPAVDFSLGEWKTQMEETKAQDILGAVTLLLEGVMAARGQLGPTCLSSLLGQLSGQTKILLGALESLLGTQLPPQGRTTAHKDPNAIFLSFQHLLRGKVRFLMLVGGSTLCVRRAPPTTAVPSRTSLVLTLNELPNRTSGLLETNFTASARTTGSGLLKWQQGFRAKIPGLLNQTSRSLDQIPGYLNRIHELLNGTRGLFPGPSRRTLGAPDISSGTSDTGSLPPNLQPGYSPSPTHPPTGQYTLFPLPPTLPTPVVQLHPLLPDPSAPTPTPTSPLLNTSYTHSQNLSQEG

SEQ ID NO: 142 - protein, 332 aa, Artificial sequence
  Synthetic
SPAPPACDLRVLSKLLRDSHVLHSRLSQCPEVHPLPTPVLLPAVDFSLGEWKTQMEETKAQDILGAVTLLLEGVMAARGQLGPTCLSSLLGQLSGQTKILLGSLESLLGTQLPPQGRTTAHKDPNAIFLSFQHLLRGKVRFLMLVGGSTLCVRRAPPTTAVPSRTSLVLTLNELPNRTSGLLETNFTASARTTGSGLLKWQQGFRAKIPGLLNQTSRSLDQIPGYLNRIHELLNGTRGLFPGPSRRTLGAPDISSGTSDTGSLPPNLQPGYSPSPTHPPTGQYTLFPLPPTLPTPVVQLHPLLPDPSAPTPTPTSPLLNTSYTHSQNLSQEG

SEQ ID NO: 143 - protein, 332 aa, Artificial sequence
  Synthetic
SPAPPACDLRVLSKLLRDSHVLHSRLSQCPEVHPLPTPVLLPAVDFSLGEWKTQMEETKAQDILGAVTLLLEGVMAARGQLGPTCLSSLLGQLSGQTKIILGALESLLGTQLPPQGRTTAHKDPNAIFLSFQHLLRGKVRFLMLVGGSTLCVRRAPPTTAVPSRTSLVLTLNELPNRTSGLLETNFTASARTTGSGLLKWQQGFRAKIPGLLNQTSRSLDQIPGYLNRIHELLNGTRGLFPGPSRRTLGAPDISSGTSDTGSLPPNLQPGYSPSPTHPPTGQYTLFPLPPTLPTPVVQLHPLLPDPSAPTPTPTSPLLNTSYTHSQNLSQEG

SEQ ID NO: 144 - protein, 332 aa, Artificial sequence
  Synthetic
SPAPPACDLRVLSKLLRDSHVLHSRLSQCPEVHPLPTPVLLPAVDFSLGEWKTQMEETKAQDILGAVTLLLEGVMAARGQLGPTCLSSLLGQLSGQTKIILGSLESLLGTQLPPQGRTTAHKDPNAIFLSFQHLLRGKVRFLMLVGGSTLCVRRAPPTTAVPSRTSLVLTLNELPNRTSGLLETNFTASARTTGSGLLKWQQGFRAKIPGLLNQTSRSLDQIPGYLNRIHELLNGTRGLFPGPSRRTLGAPDISSGTSDTGSLPPNLQPGYSPSPTHPPTGQYTLFPLPPTLPTPVVQLHPLLPDPSAPTPTPTSPLLNTSYTHSQNLSQEG

SEQ ID NO: 145 - protein, 332 aa, Artificial sequence
  Synthetic
SPAPPACDLRVLSKLLRDSHVLHSRLSQCPEVHPLPTPVLLPAVDFSLGEWKTQMEETKAQDILGAVTLLLEGVMAARGQLGPTCLSSLLGQLSGQTKVLLGALESLLGTQLPPQGRTTAHKDPNAIFLSFQHLLRGKVRFLMLVGGSTLCVRRAPPTTAVPSRTSLVLTLNELPNRTSGLLETNFTASARTTGSGLLKWQQGFRAKIPGLLNQTSRSLDQIPGYLNRIHELLNGTRGLFPGPSRRTLGAPDISSGTSDTGSLPPNLQPGYSPSPTHPPTGQYTLFPLPPTLPTPVVQLHPLLPDPSAPTPTPTSPLLNTSYTHSQNLSQEG

SEQ ID NO: 146 - protein, 332 aa, Artificial sequence
  Synthetic
SPAPPACDLRVLSKLLRDSHVLHSRLSQCPEVHPLPTPVLLPAVDFSLGEWKTQMEETKAQDILGAVTLLLEGVMAARGQLGPTCLSSLLGQLSGQTKVLLGSLESLLGTQLPPQGRTTAHKDPNAIFLSFQHLLRGKVRFLMLVGGSTLCVRRAPPTTAVPSRTSLVLTLNELPNRTSGLLETNFTASARTTGSGLLKWQQGFRAKIPGLLNQTSRSLDQIPGYLNRIHELLNGTRGLFPGPSRRTLGAPDISSGTSDTGSLPPNLQPGYSPSPTHPPTGQYTLFPLPPTLPTPVVQLHPLLPDPSAPTPTPTSPLLNTSYTHSQNLSQEG

SEQ ID NO: 147 - protein, 332 aa, Artificial sequence
  Synthetic
SPAPPACDLRVLSKLLRDSHVLHSRLSQCPEVHPLPTPVLLPAVDFSLGEWKTQMEETKAQDILGAVTLLLEGVMAARGQLGPTCLSSLLGQLSGQTKVILGALESLLGTQLPPQGRTTAHKDPNAIFLSFQHLLRGKVRFLMLVGGSTLCVRRAPPTTAVPSRTSLVLTLNELPNRTSGLLETNFTASARTTGSGLLKWQQGFRAKIPGLLNQTSRSLDQIPGYLNRIHELLNGTRGLFPGPSRRTLGAPDISSGTSDTGSLPPNLQPGYSPSPTHPPTGQYTLFPLPPTLPTPVVQLHPLLPDPSAPTPTPTSPLLNTSYTHSQNLSQEG

SEQ ID NO: 148 - protein, 332 aa, Artificial sequence
  Synthetic
SPAPPACDLRVLSKLLRDSHVLHSRLSQCPEVHPLPTPVLLPAVDFSLGEWKTQMEETKAQDILGAVTLLLEGVMAARGQLGPTCLSSLLGQLSGQTKVILGSLESLLGTQLPPQGRTTAHKDPNAIFLSFQHLLRGKVRFLMLVGGSTLCVRRAPPTTAVPSRTSLVLTLNELPNRTSGLLETNFTASARTTGSGLLKWQQGFRAKIPGLLNQTSRSLDQIPGYLNRIHELLNGTRGLFPGPSRRTLGAPDISSGTSDTGSLPPNLQPGYSPSPTHPPTGQYTLFPLPPTLPTPVVQLHPLLPDPSAPTPTPTSPLLNTSYTHSQNLSQEG

SEQ ID NO: 149 - protein, 332 aa, Artificial sequence
  Synthetic
SPAPPACDLRVLSKLLRDSHVLHSRLSQCPEVHPLPTPVLLPAVDFSLGEWKTQMEETKAQDILGAVTLLLEGVMAARGQLGPTCLSSLLGQLSGQTQLLLGALESLLGTQLPPQGRTTAHKDPNAIFLSFQHLLRGKVRFLMLVGGSTLCVRRAPPTTAVPSRTSLVLTLNELPNRTSGLLETNFTASARTTGSGLLKWQQGFRAKIPGLLNQTSRSLDQIPGYLNRIHELLNGTRGLFPGPSRRTLGAPDISSGTSDTGSLPPNLQPGYSPSPTHPPTGQYTLFPLPPTLPTPVVQLHPLLPDPSAPTPTPTSPLLNTSYTHSQNLSQEG

SEQ ID NO: 150 - protein, 332 aa, Artificial sequence
  Synthetic
SPAPPACDLRVLSKLLRDSHVLHSRLSQCPEVHPLPTPVLLPAVDFSLGEWKTQMEETKAQDILGAVTLLLEGVMAARGQLGPTCLSSLLGQLSGQTQLLLGSLESLLGTQLPPQGRTTAHKDPNAIFLSFQHLLRGKVRFLMLVGGSTLCVRRAPPTTAVPSRTSLVLTLNELPNRTSGLLETNFTASARTTGSGLLKWQQGFRAKIPGLLNQTSRSLDQIPGYLNRIHELLNGTRGLFPGPSRRTLGAPDISSGTSDTGSLPPNLQPGYSPSPTHPPTGQYTLFPLPPTLPTPVVQLHPLLPDPSAPTPTPTSPLLNTSYTHSQNLSQEG

SEQ ID NO: 151 - protein, 332 aa, Artificial sequence
  Synthetic
SPAPPACDLRVLSKLLRDSHVLHSRLSQCPEVHPLPTPVLLPAVDFSLGEWKTQMEETKAQDILGAVTLLLEGVMAARGQLGPTCLSSLLGQLSGQTQLILGALESLLGTQLPPQGRTTAHKDPNAIFLSFQHLLRGKVRFLMLVGGSTLCVRRAPPTTAVPSRTSLVLTLNELPNRTSGLLETNFTASARTTGSGLLKWQQGFRAKIPGLLNQTSRSLDQIPGYLNRIHELLNGTRGLFPGPSRRTLGAPDISSGTSDTGSLPPNLQPGYSPSPTHPPTGQYTLFPLPPTLPTPVVQLHPLLPDPSAPTPTPTSPLLNTSYTHSQNLSQEG

SEQ ID NO: 152 - protein, 332 aa, Artificial sequence
  Synthetic
SPAPPACDLRVLSKLLRDSHVLHSRLSQCPEVHPLPTPVLLPAVDFSLGEWKTQMEETKAQDILGAVTLLLEGVMAARGQLGPTCLSSLLGQLSGQTQLILGSLESLLGTQLPPQGRTTAHKDPNAIFLSFQHLLRGKVRFLMLVGGSTLCVRRAPPTTAVPSRTSLVLTLNELPNRTSGLLETNFTASARTTGSGLLKWQQGFRAKIPGLLNQTSRSLDQIPGYLNRIHELLNGTRGLFPGPSRRTLGAPDISSGTSDTGSLPPNLQPGYSPSPTHPPTGQYTLFPLPPTLPTPVVQLHPLLPDPSAPTPTPTSPLLNTSYTHSQNLSQEG

SEQ ID NO: 153 - protein, 332 aa, Artificial sequence
  Synthetic
SPAPPACDLRVLSKLLRDSHVLHSRLSQCPEVHPLPTPVLLPAVDFSLGEWKTQMEETKAQDILGAVTLLLEGVMAARGQLGPTCLSSLLGQLSGQTQILLGALESLLGTQLPPQGRTTAHKDPNAIFLSFQHLLRGKVRFLMLVGGSTLCVRRAPPTTAVPSRTSLVLTLNELPNRTSGLLETNFTASARTTGSGLLKWQQGFRAKIPGLLNQTSRSLDQIPGYLNRIHELLNGTRGLFPGPSRRTLGAPDISSGTSDTGSLPPNLQPGYSPSPTHPPTGQYTLFPLPPTLPTPVVQLHPLLPDPSAPTPTPTSPLLNTSYTHSQNLSQEG

SEQ ID NO: 154 - protein, 332 aa, Artificial sequence
  Synthetic
SPAPPACDLRVLSKLLRDSHVLHSRLSQCPEVHPLPTPVLLPAVDFSLGEWKTQMEETKAQDILGAVTLLLEGVMAARGQLGPTCLSSLLGQLSGQTQILLGSLESLLGTQLPPQGRTTAHKDPNAIFLSFQHLLRGKVRFLMLVGGSTLCVRRAPPTTAVPSRTSLVLTLNELPNRTSGLLETNFTASARTTGSGLLKWQQGFRAKIPGLLNQTSRSLDQIPGYLNRIHELLNGTRGLFPGPSRRTLGAPDISSGTSDTGSLPPNLQPGYSPSPTHPPTGQYTLFPLPPTLPTPVVQLHPLLPDPSAPTPTPTSPLLNTSYTHSQNLSQEG

SEQ ID NO: 155 - protein, 332 aa, Artificial sequence
  Synthetic
SPAPPACDLRVLSKLLRDSHVLHSRLSQCPEVHPLPTPVLLPAVDFSLGEWKTQMEETKAQDILGAVTLLLEGVMAARGQLGPTCLSSLLGQLSGQTQIILGALESLLGTQLPPQGRTTAHKDPNAIFLSFQHLLRGKVRFLMLVGGSTLCVRRAPPTTAVPSRTSLVLTLNELPNRTSGLLETNFTASARTTGSGLLKWQQGFRAKIPGLLNQTSRSLDQIPGYLNRIHELLNGTRGLFPGPSRRTLGAPDISSGTSDTGSLPPNLQPGYSPSPTHPPTGQYTLFPLPPTLPTPVVQLHPLLPDPSAPTPTPTSPLLNTSYTHSQNLSQEG

SEQ ID NO: 156 - protein, 332 aa, Artificial sequence
  Synthetic
SPAPPACDLRVLSKLLRDSHVLHSRLSQCPEVHPLPTPVLLPAVDFSLGEWKTQMEETKAQDILGAVTLLLEGVMAARGQLGPTCLSSLLGQLSGQTQIILGSLESLLGTQLPPQGRTTAHKDPNAIFLSFQHLLRGKVRFLMLVGGSTLCVRRAPPTTAVPSRTSLVLTLNELPNRTSGLLETNFTASARTTGSGLLKWQQGFRAKIPGLLNQTSRSLDQIPGYLNRIHELLNGTRGLFPGPSRRTLGAPDISSGTSDTGSLPPNLQPGYSPSPTHPPTGQYTLFPLPPTLPTPVVQLHPLLPDPSAPTPTPTSPLLNTSYTHSQNLSQEG

SEQ ID NO: 157 - protein, 332 aa, Artificial sequence
  Synthetic
SPAPPACDLRVLSKLLRDSHVLHSRLSQCPEVHPLPTPVLLPAVDFSLGEWKTQMEETKAQDILGAVTLLLEGVMAARGQLGPTCLSSLLGQLSGQTQVLLGALESLLGTQLPPQGRTTAHKDPNAIFLSFQHLLRGKVRFLMLVGGSTLCVRRAPPTTAVPSRTSLVLTLNELPNRTSGLLETNFTASARTTGSGLLKWQQGFRAKIPGLLNQTSRSLDQIPGYLNRIHELLNGTRGLFPGPSRRTLGAPDISSGTSDTGSLPPNLQPGYSPSPTHPPTGQYTLFPLPPTLPTPVVQLHPLLPDPSAPTPTPTSPLLNTSYTHSQNLSQEG

SEQ ID NO: 158 - protein, 332 aa, Artificial sequence
  Synthetic
SPAPPACDLRVLSKLLRDSHVLHSRLSQCPEVHPLPTPVLLPAVDFSLGEWKTQMEETKAQDILGAVTLLLEGVMAARGQLGPTCLSSLLGQLSGQTQVLLGSLESLLGTQLPPQGRTTAHKDPNAIFLSFQHLLRGKVRFLMLVGGSTLCVRRAPPTTAVPSRTSLVLTLNELPNRTSGLLETNFTASARTTGSGLLKWQQGFRAKIPGLLNQTSRSLDQIPGYLNRIHELLNGTRGLFPGPSRRTLGAPDISSGTSDTGSLPPNLQPGYSPSPTHPPTGQYTLFPLPPTLPTPVVQLHPLLPDPSAPTPTPTSPLLNTSYTHSQNLSQEG

SEQ ID NO: 159 - protein, 332 aa, Artificial sequence
  Synthetic
SPAPPACDLRVLSKLLRDSHVLHSRLSQCPEVHPLPTPVLLPAVDFSLGEWKTQMEETKAQDILGAVTLLLEGVMAARGQLGPTCLSSLLGQLSGQTQVILGALESLLGTQLPPQGRTTAHKDPNAIFLSFQHLLRGKVRFLMLVGGSTLCVRRAPPTTAVPSRTSLVLTLNELPNRTSGLLETNFTASARTTGSGLLKWQQGFRAKIPGLLNQTSRSLDQIPGYLNRIHELLNGTRGLFPGPSRRTLGAPDISSGTSDTGSLPPNLQPGYSPSPTHPPTGQYTLFPLPPTLPTPVVQLHPLLPDPSAPTPTPTSPLLNTSYTHSQNLSQEG

SEQ ID NO: 160 - protein, 332 aa, Artificial sequence
  Synthetic
SPAPPACDLRVLSKLLRDSHVLHSRLSQCPEVHPLPTPVLLPAVDFSLGEWKTQMEETKAQDILGAVTLLLEGVMAARGQLGPTCLSSLLGQLSGQTQVILGSLESLLGTQLPPQGRTTAHKDPNAIFLSFQHLLRGKVRFLMLVGGSTLCVRRAPPTTAVPSRTSLVLTLNELPNRTSGLLETNFTASARTTGSGLLKWQQGFRAKIPGLLNQTSRSLDQIPGYLNRIHELLNGTRGLFPGPSRRTLGAPDISSGTSDTGSLPPNLQPGYSPSPTHPPTGQYTLFPLPPTLPTPVVQLHPLLPDPSAPTPTPTSPLLNTSYTHSQNLSQEG

SEQ ID NO: 161 - protein, 332 aa, Artificial sequence
  Synthetic
SPAPPACDLRVLSKLLRDSHVLHSRLSQCPEVHPLPTPVLLPAVDFSLGEWKTQMEETKAQDILGAVTLLLEGVMAARGQLGPTCLSSLLGQLSGQVRLLLGALQSLLGTQLPPQGRTTAHKDPNAIFLSFQHLARGKVKHLLLVGGSTLCVRRAPPTTAVPSRTSLVLTLNELPNRTSGLLETNFTASARTTGSGLLKWQQGFRAKIPGLLNQTSRSLDQIPGYLNRIHELLNGTRGLFPGPSRRTLGAPDISSGTSDTGSLPPNLQPGYSPSPTHPPTGQYTLFPLPPTLPTPVVQLHPLLPDPSAPTPTPTSPLLNTSYTHSQNLSQEG

SEQ ID NO: 162 - protein, 332 aa, Artificial sequence
  Synthetic
SPAPPACDLRVLSKLLRDSHVLHSRLSQCPEVHPLPTPVLLPAVDFSLGEWKTQMEETKAQDILGAVTLLLEGVMAARGQLGPTCLSSLLGQLSGQVRLLLGALQSLLGTQLPPQGRTTAHKDPNAIFLSFQHLARGKVKLLLLVGGSTLCVRRAPPTTAVPSRTSLVLTLNELPNRTSGLLETNFTASARTTGSGLLKWQQGFRAKIPGLLNQTSRSLDQIPGYLNRIHELLNGTRGLFPGPSRRTLGAPDISSGTSDTGSLPPNLQPGYSPSPTHPPTGQYTLFPLPPTLPTPVVQLHPLLPDPSAPTPTPTSPLLNTSYTHSQNLSQEG

SEQ ID NO: 163 - protein, 332 aa, Artificial sequence
  Synthetic
SPAPPACDLRVLSKLLRDSHVLHSRLSQCPEVHPLPTPVLLPAVDFSLGEWKTQMEETKAQDILGAVTLLLEGVMAARGQLGPTCLSSLLGQLSGQVRLLLGALQSLLGTQLPPQGRTTAHKDPNAIFLSFQHLARGKVKHLMLVGGSTLCVRRAPPTTAVPSRTSLVLTLNELPNRTSGLLETNFTASARTTGSGLLKWQQGFRAKIPGLLNQTSRSLDQIPGYLNRIHELLNGTRGLFPGPSRRTLGAPDISSGTSDTGSLPPNLQPGYSPSPTHPPTGQYTLFPLPPTLPTPVVQLHPLLPDPSAPTPTPTSPLLNTSYTHSQNLSQEG

SEQ ID NO: 164 - protein, 332 aa, Artificial sequence
  Synthetic
SPAPPACDLRVLSKLLRDSHVLHSRLSQCPEVHPLPTPVLLPAVDFSLGEWKTQMEETKAQDILGAVTLLLEGVMAARGQLGPTCLSSLLGQLSGQVRLLLGALQSLLGTQLPPQGRTTAHKDPNAIFLSFQHLARGKVKLLMLVGGSTLCVRRAPPTTAVPSRTSLVLTLNELPNRTSGLLETNFTASARTTGSGLLKWQQGFRAKIPGLLNQTSRSLDQIPGYLNRIHELLNGTRGLFPGPSRRTLGAPDISSGTSDTGSLPPNLQPGYSPSPTHPPTGQYTLFPLPPTLPTPVVQLHPLLPDPSAPTPTPTSPLLNTSYTHSQNLSQEG

SEQ ID NO: 165 - protein, 332 aa, Artificial sequence
  Synthetic
SPAPPACDLRVLSKLLRDSHVLHSRLSQCPEVHPLPTPVLLPAVDFSLGEWKTQMEETKAQDILGAVTLLLEGVMAARGQLGPTCLSSLLGQLSGQVRLLLGALQSLLGTQLPPQGRTTAHKDPNAIFLSFQHLARGKVRHLLLVGGSTLCVRRAPPTTAVPSRTSLVLTLNELPNRTSGLLETNFTASARTTGSGLLKWQQGFRAKIPGLLNQTSRSLDQIPGYLNRIHELLNGTRGLFPGPSRRTLGAPDISSGTSDTGSLPPNLQPGYSPSPTHPPTGQYTLFPLPPTLPTPVVQLHPLLPDPSAPTPTPTSPLLNTSYTHSQNLSQEG

SEQ ID NO: 166 - protein, 332 aa, Artificial sequence
  Synthetic
SPAPPACDLRVLSKLLRDSHVLHSRLSQCPEVHPLPTPVLLPAVDFSLGEWKTQMEETKAQDILGAVTLLLEGVMAARGQLGPTCLSSLLGQLSGQVRLLLGALQSLLGTQLPPQGRTTAHKDPNAIFLSFQHLARGKVKFLQLVGGSTLCVRRAPPTTAVPSRTSLVLTLNELPNRTSGLLETNFTASARTTGSGLLKWQQGFRAKIPGLLNQTSRSLDQIPGYLNRIHELLNGTRGLFPGPSRRTLGAPDISSGTSDTGSLPPNLQPGYSPSPTHPPTGQYTLFPLPPTLPTPVVQLHPLLPDPSAPTPTPTSPLLNTSYTHSQNLSQEG

SEQ ID NO: 167 - protein, 332 aa, Artificial sequence
  Synthetic
SPAPPACDLRVLSKLLRDSHVLHSRLSQCPEVHPLPTPVLLPAVDFSLGEWKTQMEETKAQDILGAVTLLLEGVMAARGQLGPTCLSSLLGQLSGQVRLLLGALQSLLGTQLPPQGRTTAHKDPNAIFLSFQHLARGKVKHLQLVGGSTLCVRRAPPTTAVPSRTSLVLTLNELPNRTSGLLETNFTASARTTGSGLLKWQQGFRAKIPGLLNQTSRSLDQIPGYLNRIHELLNGTRGLFPGPSRRTLGAPDISSGTSDTGSLPPNLQPGYSPSPTHPPTGQYTLFPLPPTLPTPVVQLHPLLPDPSAPTPTPTSPLLNTSYTHSQNLSQEG

SEQ ID NO: 168 - protein, 332 aa, Artificial sequence
  Synthetic
SPAPPACDLRVLSKLLRDSHVLHSRLSQCPEVHPLPTPVLLPAVDFSLGEWKTQMEETKAQDILGAVTLLLEGVMAARGQLGPTCLSSLLGQLSGQVRLLLGALQSLLGTQLPPQGRTTAHKDPNAIFLSFQHLARGKVKLLQLVGGSTLCVRRAPPTTAVPSRTSLVLTLNELPNRTSGLLETNFTASARTTGSGLLKWQQGFRAKIPGLLNQTSRSLDQIPGYLNRIHELLNGTRGLFPGPSRRTLGAPDISSGTSDTGSLPPNLQPGYSPSPTHPPTGQYTLFPLPPTLPTPVVQLHPLLPDPSAPTPTPTSPLLNTSYTHSQNLSQEG

SEQ ID NO: 169 - protein, 332 aa, Artificial sequence
  Synthetic
SPAPPACDLRVLSKLLRDSHVLHSRLSQCPEVHPLPTPVLLPAVDFSLGEWKTQMEETKAQDILGAVTLLLEGVMAARGQLGPTCLSSLLGQLSGQVRLLLGALQSLLGTQLPPQGRTTAHKDPNAIFLSFQHLARGKVKYLQLVGGSTLCVRRAPPTTAVPSRTSLVLTLNELPNRTSGLLETNFTASARTTGSGLLKWQQGFRAKIPGLLNQTSRSLDQIPGYLNRIHELLNGTRGLFPGPSRRTLGAPDISSGTSDTGSLPPNLQPGYSPSPTHPPTGQYTLFPLPPTLPTPVVQLHPLLPDPSAPTPTPTSPLLNTSYTHSQNLSQEG

SEQ ID NO: 170 - protein, 332 aa, Artificial sequence
  Synthetic
SPAPPACDLRVLSKLLRDSHVLHSRLSQCPEVHPLPTPVLLPAVDFSLGEWKTQMEETKAQDILGAVTLLLEGVMAARGQLGPTCLSSLLGQLSGQVRLLLGALQSLLGTQLPPQGRTTAHKDPNAIFLSFQHLARGKVRHLMLVGGSTLCVRRAPPTTAVPSRTSLVLTLNELPNRTSGLLETNFTASARTTGSGLLKWQQGFRAKIPGLLNQTSRSLDQIPGYLNRIHELLNGTRGLFPGPSRRTLGAPDISSGTSDTGSLPPNLQPGYSPSPTHPPTGQYTLFPLPPTLPTPVVQLHPLLPDPSAPTPTPTSPLLNTSYTHSQNLSQEG

SEQ ID NO: 171 - protein, 332 aa, Artificial sequence
  Synthetic
SPAPPACDLRVLSKLLRDSHVLHSRLSQCPEVHPLPTPVLLPAVDFSLGEWKTQMEETKAQDILGAVTLLLEGVMAARGQLGPTCLSSLLGQLSGQVRLLLGALQSLLGTQLPPQGRTTAHKDPNAIFLSFQHLARGKVRHLQLVGGSTLCVRRAPPTTAVPSRTSLVLTLNELPNRTSGLLETNFTASARTTGSGLLKWQQGFRAKIPGLLNQTSRSLDQIPGYLNRIHELLNGTRGLFPGPSRRTLGAPDISSGTSDTGSLPPNLQPGYSPSPTHPPTGQYTLFPLPPTLPTPVVQLHPLLPDPSAPTPTPTSPLLNTSYTHSQNLSQEG

SEQ ID NO: 172 - protein, 332 aa, Artificial sequence
  Synthetic
SPAPPACDLRVLSKLLRDSHVLHSRLSQCPEVHPLPTPVLLPAVDFSLGEWKTQMEETKAQDILGAVTLLLEGVMAARGQLGPTCLSSLLGQLSGQVRLLLGALQSLLGTQLPPQGRTTAHKDPNAIFLSFQHLARGKVKFLLLVGGSTLCVRRAPPTTAVPSRTSLVLTLNELPNRTSGLLETNFTASARTTGSGLLKWQQGFRAKIPGLLNQTSRSLDQIPGYLNRIHELLNGTRGLFPGPSRRTLGAPDISSGTSDTGSLPPNLQPGYSPSPTHPPTGQYTLFPLPPTLPTPVVQLHPLLPDPSAPTPTPTSPLLNTSYTHSQNLSQEG

SEQ ID NO: 173 - protein, 332 aa, Artificial sequence
  Synthetic
SPAPPACDLRVLSKLLRDSHVLHSRLSQCPEVHPLPTPVLLPAVDFSLGEWKTQMEETKAQDILGAVTLLLEGVMAARGQLGPTCLSSLLGQLSGQVRLLLGALQSLLGTQLPPQGRTTAHKDPNAIFLSFQHLARGKVKYLLLVGGSTLCVRRAPPTTAVPSRTSLVLTLNELPNRTSGLLETNFTASARTTGSGLLKWQQGFRAKIPGLLNQTSRSLDQIPGYLNRIHELLNGTRGLFPGPSRRTLGAPDISSGTSDTGSLPPNLQPGYSPSPTHPPTGQYTLFPLPPTLPTPVVQLHPLLPDPSAPTPTPTSPLLNTSYTHSQNLSQEG

SEQ ID NO: 174 - protein, 332 aa, Artificial sequence
  Synthetic
SPAPPACDLRVLSKLLRDSHVLHSRLSQCPEVHPLPTPVLLPAVDFSLGEWKTQMEETKAQDILGAVTLLLEGVMAARGQLGPTCLSSLLGQLSGQVRLLLGALQSLLGTQLPPQGRTTAHKDPNAIFLSFQHLARGKVKFLMLVGGSTLCVRRAPPTTAVPSRTSLVLTLNELPNRTSGLLETNFTASARTTGSGLLKWQQGFRAKIPGLLNQTSRSLDQIPGYLNRIHELLNGTRGLFPGPSRRTLGAPDISSGTSDTGSLPPNLQPGYSPSPTHPPTGQYTLFPLPPTLPTPVVQLHPLLPDPSAPTPTPTSPLLNTSYTHSQNLSQEG

SEQ ID NO: 175 - protein, 332 aa, Artificial sequence
  Synthetic
SPAPPACDLRVLSKLLRDSHVLHSRLSQCPEVHPLPTPVLLPAVDFSLGEWKTQMEETKAQDILGAVTLLLEGVMAARGQLGPTCLSSLLGQLSGQVRLLLGALQSLLGTQLPPQGRTTAHKDPNAIFLSFQHLARGKVKYLMLVGGSTLCVRRAPPTTAVPSRTSLVLTLNELPNRTSGLLETNFTASARTTGSGLLKWQQGFRAKIPGLLNQTSRSLDQIPGYLNRIHELLNGTRGLFPGPSRRTLGAPDISSGTSDTGSLPPNLQPGYSPSPTHPPTGQYTLFPLPPTLPTPVVQLHPLLPDPSAPTPTPTSPLLNTSYTHSQNLSQEG

SEQ ID NO: 176 - protein, 332 aa, Artificial sequence
  Synthetic
SPAPPACDLRVLSKLLRDSHVLHSRLSQCPEVHPLPTPVLLPAVDFSLGEWKTQMEETKAQDILGAVTLLLEGVMAARGQLGPTCLSSLLGQLSGQVRLLLGALQSLLGTQLPPQGRTTAHKDPNAIFLSFQHLARGKVRFLQLVGGSTLCVRRAPPTTAVPSRTSLVLTLNELPNRTSGLLETNFTASARTTGSGLLKWQQGFRAKIPGLLNQTSRSLDQIPGYLNRIHELLNGTRGLFPGPSRRTLGAPDISSGTSDTGSLPPNLQPGYSPSPTHPPTGQYTLFPLPPTLPTPVVQLHPLLPDPSAPTPTPTSPLLNTSYTHSQNLSQEG

SEQ ID NO: 177 - protein, 332 aa, Artificial sequence
  Synthetic
SPAPPACDLRVLSKLLRDSHVLHSRLSQCPEVHPLPTPVLLPAVDFSLGEWKTQMEETKAQDILGAVTLLLEGVMAARGQLGPTCLSSLLGQLSGQVRLLLGALQSLLGTQLPPQGRTTAHKDPNAIFLSFQHLARGKVRYLQLVGGSTLCVRRAPPTTAVPSRTSLVLTLNELPNRTSGLLETNFTASARTTGSGLLKWQQGFRAKIPGLLNQTSRSLDQIPGYLNRIHELLNGTRGLFPGPSRRTLGAPDISSGTSDTGSLPPNLQPGYSPSPTHPPTGQYTLFPLPPTLPTPVVQLHPLLPDPSAPTPTPTSPLLNTSYTHSQNLSQEG

SEQ ID NO: 178 - protein, 332 aa, Artificial sequence
  Synthetic
SPAPPACDLRVLSKLLRDSHVLHSRLSQCPEVHPLPTPVLLPAVDFSLGEWKTQMEETKAQDILGAVTLLLEGVMAARGQLGPTCLSSLLGQLSGQVRLLLGALQSLLGTQLPPQGRTTAHKDPNAIFLSFQHLARGKVRFLLLVGGSTLCVRRAPPTTAVPSRTSLVLTLNELPNRTSGLLETNFTASARTTGSGLLKWQQGFRAKIPGLLNQTSRSLDQIPGYLNRIHELLNGTRGLFPGPSRRTLGAPDISSGTSDTGSLPPNLQPGYSPSPTHPPTGQYTLFPLPPTLPTPVVQLHPLLPDPSAPTPTPTSPLLNTSYTHSQNLSQEG

SEQ ID NO: 179 - protein, 332 aa, Artificial sequence
  Synthetic
SPAPPACDLRVLSKLLRDSHVLHSRLSQCPEVHPLPTPVLLPAVDFSLGEWKTQMEETKAQDILGAVTLLLEGVMAARGQLGPTCLSSLLGQLSGQVRLLLGALQSLLGTQLPPQGRTTAHKDPNAIFLSFQHLARGKVRYLLLVGGSTLCVRRAPPTTAVPSRTSLVLTLNELPNRTSGLLETNFTASARTTGSGLLKWQQGFRAKIPGLLNQTSRSLDQIPGYLNRIHELLNGTRGLFPGPSRRTLGAPDISSGTSDTGSLPPNLQPGYSPSPTHPPTGQYTLFPLPPTLPTPVVQLHPLLPDPSAPTPTPTSPLLNTSYTHSQNLSQEG

SEQ ID NO: 180 - protein, 332 aa, Artificial sequence
  Synthetic
SPAPPACDLRVLSKLLRDSHVLHSRLSQCPEVHPLPTPVLLPAVDFSLGEWKTQMEETKAQDILGAVTLLLEGVMAARGQLGPTCLSSLLGQLSGQVRLLLGALQSLLGTQLPPQGRTTAHKDPNAIFLSFQHLARGKVRFLMLVGGSTLCVRRAPPTTAVPSRTSLVLTLNELPNRTSGLLETNFTASARTTGSGLLKWQQGFRAKIPGLLNQTSRSLDQIPGYLNRIHELLNGTRGLFPGPSRRTLGAPDISSGTSDTGSLPPNLQPGYSPSPTHPPTGQYTLFPLPPTLPTPVVQLHPLLPDPSAPTPTPTSPLLNTSYTHSQNLSQEG

SEQ ID NO: 181 - protein, 332 aa, Artificial sequence
  Synthetic
SPAPPACDLRVLSKLLRDSHVLHSRLSQCPEVHPLPTPVLLPAVDFSLGEWKTQMEETKAQDILGAVTLLLEGVMAARGQLGPTCLSSLLGQLSGQVRLLLGALQSLLGTQLPPQGRTTAHKDPNAIFLSFQHLARGKVRYLMLVGGSTLCVRRAPPTTAVPSRTSLVLTLNELPNRTSGLLETNFTASARTTGSGLLKWQQGFRAKIPGLLNQTSRSLDQIPGYLNRIHELLNGTRGLFPGPSRRTLGAPDISSGTSDTGSLPPNLQPGYSPSPTHPPTGQYTLFPLPPTLPTPVVQLHPLLPDPSAPTPTPTSPLLNTSYTHSQNLSQEG

SEQ ID NO: 182 - protein, 332 aa, Artificial sequence
  Synthetic
SPAPPACDLRVLSKLLRDSHVLHSRLSQCPEVHPLPTPVLLPAVDFSLGEWKTQMEETKAQDILGAVTLLLEGVMAARGQLGPTCLSSLLGQLSGQVRLLLGALQSLLGTQLPPQGRTTAHKDPNAIFLSFQHLLRGKVKYLLLVGGSTLCVRRAPPTTAVPSRTSLVLTLNELPNRTSGLLETNFTASARTTGSGLLKWQQGFRAKIPGLLNQTSRSLDQIPGYLNRIHELLNGTRGLFPGPSRRTLGAPDISSGTSDTGSLPPNLQPGYSPSPTHPPTGQYTLFPLPPTLPTPVVQLHPLLPDPSAPTPTPTSPLLNTSYTHSQNLSQEG

SEQ ID NO: 183 - protein, 332 aa, Artificial sequence
  Synthetic
SPAPPACDLRVLSKLLRDSHVLHSRLSQCPEVHPLPTPVLLPAVDFSLGEWKTQMEETKAQDILGAVTLLLEGVMAARGQLGPTCLSSLLGQLSGQVRLLLGALQSLLGTQLPPQGRTTAHKDPNAIFLSFQHLIRGKVKYLLLVGGSTLCVRRAPPTTAVPSRTSLVLTLNELPNRTSGLLETNFTASARTTGSGLLKWQQGFRAKIPGLLNQTSRSLDQIPGYLNRIHELLNGTRGLFPGPSRRTLGAPDISSGTSDTGSLPPNLQPGYSPSPTHPPTGQYTLFPLPPTLPTPVVQLHPLLPDPSAPTPTPTSPLLNTSYTHSQNLSQEG

SEQ ID NO: 184 - protein, 332 aa, Artificial sequence
  Synthetic
SPAPPACDLRVLSKLLRDSHVLHSRLSQCPEVHPLPTPVLLPAVDFSLGEWKTQMEETKAQDILGAVTLLLEGVMAARGQLGPTCLSSLLGQLSGQVRLLLGALQSLLGTQLPPQGRTTAHKDPNAIFLSFQHLVRGKVKYLLLVGGSTLCVRRAPPTTAVPSRTSLVLTLNELPNRTSGLLETNFTASARTTGSGLLKWQQGFRAKIPGLLNQTSRSLDQIPGYLNRIHELLNGTRGLFPGPSRRTLGAPDISSGTSDTGSLPPNLQPGYSPSPTHPPTGQYTLFPLPPTLPTPVVQLHPLLPDPSAPTPTPTSPLLNTSYTHSQNLSQEG

SEQ ID NO: 185 - protein, 332 aa, Artificial sequence
  Synthetic
SPAPPACDLRVLSKLLRDSHVLHSRLSQCPEVHPLPTPVLLPAVDFSLGEWKTQMEETKAQDILGAVTLLLEGVMAARGQLGPTCLSSLLGQLSGQVRLLLGALQSLLGTQLPPQGRTTAHKDPNAIFLSFQHLFRGKVRYLLLVGGSTLCVRRAPPTTAVPSRTSLVLTLNELPNRTSGLLETNFTASARTTGSGLLKWQQGFRAKIPGLLNQTSRSLDQIPGYLNRIHELLNGTRGLFPGPSRRTLGAPDISSGTSDTGSLPPNLQPGYSPSPTHPPTGQYTLFPLPPTLPTPVVQLHPLLPDPSAPTPTPTSPLLNTSYTHSQNLSQEG

SEQ ID NO: 186 - protein, 332 aa, Artificial sequence
  Synthetic
SPAPPACDLRVLSKLLRDSHVLHSRLSQCPEVHPLPTPVLLPAVDFSLGEWKTQMEETKAQDILGAVTLLLEGVMAARGQLGPTCLSSLLGQLSGQVRLLLGALQSLLGTQLPPQGRTTAHKDPNAIFLSFQHLFRGKVRHLLLVGGSTLCVRRAPPTTAVPSRTSLVLTLNELPNRTSGLLETNFTASARTTGSGLLKWQQGFRAKIPGLLNQTSRSLDQIPGYLNRIHELLNGTRGLFPGPSRRTLGAPDISSGTSDTGSLPPNLQPGYSPSPTHPPTGQYTLFPLPPTLPTPVVQLHPLLPDPSAPTPTPTSPLLNTSYTHSQNLSQEG

SEQ ID NO: 187 - protein, 332 aa, Artificial sequence
  Synthetic
SPAPPACDLRVLSKLLRDSHVLHSRLSQCPEVHPLPTPVLLPAVDFSLGEWKTQMEETKAQDILGAVTLLLEGVMAARGQLGPTCLSSLLGQLSGQVRLLLGALQSLLGTQLPPQGRTTAHKDPNAIFLSFQHLLRGKVKHLLLVGGSTLCVRRAPPTTAVPSRTSLVLTLNELPNRTSGLLETNFTASARTTGSGLLKWQQGFRAKIPGLLNQTSRSLDQIPGYLNRIHELLNGTRGLFPGPSRRTLGAPDISSGTSDTGSLPPNLQPGYSPSPTHPPTGQYTLFPLPPTLPTPVVQLHPLLPDPSAPTPTPTSPLLNTSYTHSQNLSQEG

SEQ ID NO: 188 - protein, 332 aa, Artificial sequence
  Synthetic
SPAPPACDLRVLSKLLRDSHVLHSRLSQCPEVHPLPTPVLLPAVDFSLGEWKTQMEETKAQDILGAVTLLLEGVMAARGQLGPTCLSSLLGQLSGQVRLLLGALQSLLGTQLPPQGRTTAHKDPNAIFLSFQHLIRGKVKHLLLVGGSTLCVRRAPPTTAVPSRTSLVLTLNELPNRTSGLLETNFTASARTTGSGLLKWQQGFRAKIPGLLNQTSRSLDQIPGYLNRIHELLNGTRGLFPGPSRRTLGAPDISSGTSDTGSLPPNLQPGYSPSPTHPPTGQYTLFPLPPTLPTPVVQLHPLLPDPSAPTPTPTSPLLNTSYTHSQNLSQEG

SEQ ID NO: 189 - protein, 332 aa, Artificial sequence
  Synthetic
SPAPPACDLRVLSKLLRDSHVLHSRLSQCPEVHPLPTPVLLPAVDFSLGEWKTQMEETKAQDILGAVTLLLEGVMAARGQLGPTCLSSLLGQLSGQVRLLLGALQSLLGTQLPPQGRTTAHKDPNAIFLSFQHLVRGKVKHLLLVGGSTLCVRRAPPTTAVPSRTSLVLTLNELPNRTSGLLETNFTASARTTGSGLLKWQQGFRAKIPGLLNQTSRSLDQIPGYLNRIHELLNGTRGLFPGPSRRTLGAPDISSGTSDTGSLPPNLQPGYSPSPTHPPTGQYTLFPLPPTLPTPVVQLHPLLPDPSAPTPTPTSPLLNTSYTHSQNLSQEG

SEQ ID NO: 190 - protein, 332 aa, Artificial sequence
  Synthetic
SPAPPACDLRVLSKLLRDSHVLHSRLSQCPEVHPLPTPVLLPAVDFSLGEWKTQMEETKAQDILGAVTLLLEGVMAARGQLGPTCLSSLLGQLSGQVRLLLGALQSLLGTQLPPQGRTTAHKDPNAIFLSFQHLLRGKVKFLLLVGGSTLCVRRAPPTTAVPSRTSLVLTLNELPNRTSGLLETNFTASARTTGSGLLKWQQGFRAKIPGLLNQTSRSLDQIPGYLNRIHELLNGTRGLFPGPSRRTLGAPDISSGTSDTGSLPPNLQPGYSPSPTHPPTGQYTLFPLPPTLPTPVVQLHPLLPDPSAPTPTPTSPLLNTSYTHSQNLSQEG

SEQ ID NO: 191 - protein, 332 aa, Artificial sequence
  Synthetic
SPAPPACDLRVLSKLLRDSHVLHSRLSQCPEVHPLPTPVLLPAVDFSLGEWKTQMEETKAQDILGAVTLLLEGVMAARGQLGPTCLSSLLGQLSGQVRLLLGALQSLLGTQLPPQGRTTAHKDPNAIFLSFQHLIRGKVKFLLLVGGSTLCVRRAPPTTAVPSRTSLVLTLNELPNRTSGLLETNFTASARTTGSGLLKWQQGFRAKIPGLLNQTSRSLDQIPGYLNRIHELLNGTRGLFPGPSRRTLGAPDISSGTSDTGSLPPNLQPGYSPSPTHPPTGQYTLFPLPPTLPTPVVQLHPLLPDPSAPTPTPTSPLLNTSYTHSQNLSQEG

SEQ ID NO: 192 - protein, 332 aa, Artificial sequence
  Synthetic
SPAPPACDLRVLSKLLRDSHVLHSRLSQCPEVHPLPTPVLLPAVDFSLGEWKTQMEETKAQDILGAVTLLLEGVMAARGQLGPTCLSSLLGQLSGQVRLLLGALQSLLGTQLPPQGRTTAHKDPNAIFLSFQHLVRGKVKFLLLVGGSTLCVRRAPPTTAVPSRTSLVLTLNELPNRTSGLLETNFTASARTTGSGLLKWQQGFRAKIPGLLNQTSRSLDQIPGYLNRIHELLNGTRGLFPGPSRRTLGAPDISSGTSDTGSLPPNLQPGYSPSPTHPPTGQYTLFPLPPTLPTPVVQLHPLLPDPSAPTPTPTSPLLNTSYTHSQNLSQEG

SEQ ID NO: 193 - protein, 332 aa, Artificial sequence
  Synthetic
SPAPPACDLRVLSKLLRDSHVLHSRLSQCPEVHPLPTPVLLPAVDFSLGEWKTQMEETKAQDILGAVTLLLEGVMAARGQLGPTCLSSLLGQLSGQVRLLLGALQSLLGTQLPPQGRTTAHKDPNAIFLSFQHLLRGKVRFLNLVGGSTLCVRRAPPTTAVPSRTSLVLTLNELPNRTSGLLETNFTASARTTGSGLLKWQQGFRAKIPGLLNQTSRSLDQIPGYLNRIHELLNGTRGLFPGPSRRTLGAPDISSGTSDTGSLPPNLQPGYSPSPTHPPTGQYTLFPLPPTLPTPVVQLHPLLPDPSAPTPTPTSPLLNTSYTHSQNLSQEG

SEQ ID NO: 194 - protein, 332 aa, Artificial sequence
  Synthetic
SPAPPACDLRVLSKLLRDSHVLHSRLSQCPEVHPLPTPVLLPAVDFSLGEWKTQMEETKAQDILGAVTLLLEGVMAARGQLGPTCLSSLLGQLSGQVRLLLGALQSLLGTQLPPQGRTTAHKDPNAIFLSFQHLLRGKVRDLMLVGGSTLCVRRAPPTTAVPSRTSLVLTLNELPNRTSGLLETNFTASARTTGSGLLKWQQGFRAKIPGLLNQTSRSLDQIPGYLNRIHELLNGTRGLFPGPSRRTLGAPDISSGTSDTGSLPPNLQPGYSPSPTHPPTGQYTLFPLPPTLPTPVVQLHPLLPDPSAPTPTPTSPLLNTSYTHSQNLSQEG

SEQ ID NO: 195 - protein, 332 aa, Artificial sequence
  Synthetic
SPAPPACDLRVLSKLLRDSHVLHSRLSQCPEVHPLPTPVLLPAVDFSLGEWKTQMEETKAQDILGAVTLLLEGVMAARGQLGPTCLSSLLGQLSGQVRLLLGALQSLLGTQLPPQGRTTAHKDPNAIFLSFQHLLRGKVRDLNLVGGSTLCVRRAPPTTAVPSRTSLVLTLNELPNRTSGLLETNFTASARTTGSGLLKWQQGFRAKIPGLLNQTSRSLDQIPGYLNRIHELLNGTRGLFPGPSRRTLGAPDISSGTSDTGSLPPNLQPGYSPSPTHPPTGQYTLFPLPPTLPTPVVQLHPLLPDPSAPTPTPTSPLLNTSYTHSQNLSQEG

SEQ ID NO: 196 - protein, 332 aa, Artificial sequence
  Synthetic
SPAPPACDLRVLSKLLRDSHVLHSRLSQCPEVHPLPTPVLLPAVDFSLGEWKTQMEETKAQDILGAVTLLLEGVMAARGQLGPTCLSSLLGQLSGQVRLLLGALQSLLGTQLPPQGRTTAHKDPNAIFLSFQHLLRGKVRDLLLVGGSTLCVRRAPPTTAVPSRTSLVLTLNELPNRTSGLLETNFTASARTTGSGLLKWQQGFRAKIPGLLNQTSRSLDQIPGYLNRIHELLNGTRGLFPGPSRRTLGAPDISSGTSDTGSLPPNLQPGYSPSPTHPPTGQYTLFPLPPTLPTPVVQLHPLLPDPSAPTPTPTSPLLNTSYTHSQNLSQEG

SEQ ID NO: 197 - protein, 332 aa, Artificial sequence
  Synthetic
SPAPPACDLRVLSKLLRDSHVLHSRLSQCPEVHPLPTPVLLPAVDFSLGEWKTQMEETKAQDILGAVTLLLEGVMAARGQLGPTCLSSLLGQLSGQVRLLLGALQSLLGTQLPPQGRTTAHKDPNAIFLSFQHLLRGKVRTLMLVGGSTLCVRRAPPTTAVPSRTSLVLTLNELPNRTSGLLETNFTASARTTGSGLLKWQQGFRAKIPGLLNQTSRSLDQIPGYLNRIHELLNGTRGLFPGPSRRTLGAPDISSGTSDTGSLPPNLQPGYSPSPTHPPTGQYTLFPLPPTLPTPVVQLHPLLPDPSAPTPTPTSPLLNTSYTHSQNLSQEG

SEQ ID NO: 198 - protein, 332 aa, Artificial sequence
  Synthetic
SPAPPACDLRVLSKLLRDSHVLHSRLSQCPEVHPLPTPVLLPAVDFSLGEWKTQMEETKAQDILGAVTLLLEGVMAARGQLGPTCLSSLLGQLSGQVRLLLGALQSLLGTQLPPQGRTTAHKDPNAIFLSFQHLLRGKVRTLNLVGGSTLCVRRAPPTTAVPSRTSLVLTLNELPNRTSGLLETNFTASARTTGSGLLKWQQGFRAKIPGLLNQTSRSLDQIPGYLNRIHELLNGTRGLFPGPSRRTLGAPDISSGTSDTGSLPPNLQPGYSPSPTHPPTGQYTLFPLPPTLPTPVVQLHPLLPDPSAPTPTPTSPLLNTSYTHSQNLSQEG

SEQ ID NO: 199 - protein, 332 aa, Artificial sequence
  Synthetic
SPAPPACDLRVLSKLLRDSHVLHSRLSQCPEVHPLPTPVLLPAVDFSLGEWKTQMEETKAQDILGAVTLLLEGVMAARGQLGPTCLSSLLGQLSGQVRLLLGALQSLLGTQLPPQGRTTAHKDPNAIFLSFQHLLRGKVRTLLLVGGSTLCVRRAPPTTAVPSRTSLVLTLNELPNRTSGLLETNFTASARTTGSGLLKWQQGFRAKIPGLLNQTSRSLDQIPGYLNRIHELLNGTRGLFPGPSRRTLGAPDISSGTSDTGSLPPNLQPGYSPSPTHPPTGQYTLFPLPPTLPTPVVQLHPLLPDPSAPTPTPTSPLLNTSYTHSQNLSQEG

SEQ ID NO: 200 - protein, 332 aa, Artificial sequence
  Synthetic
SPAPPACDLRVLSKLLRDSHVLHSRLSQCPEVHPLPTPVLLPAVDFSLGEWKTQMEETKAQDILGAVTLLLEGVMAARGQLGPTCLSSLLGQLSGQVRLLLGALQSLLGTQLPPQGRTTAHKDPNAIFLSFQHLLRGKVRQLMLVGGSTLCVRRAPPTTAVPSRTSLVLTLNELPNRTSGLLETNFTASARTTGSGLLKWQQGFRAKIPGLLNQTSRSLDQIPGYLNRIHELLNGTRGLFPGPSRRTLGAPDISSGTSDTGSLPPNLQPGYSPSPTHPPTGQYTLFPLPPTLPTPVVQLHPLLPDPSAPTPTPTSPLLNTSYTHSQNLSQEG

SEQ ID NO: 201 - protein, 332 aa, Artificial sequence
  Synthetic
SPAPPACDLRVLSKLLRDSHVLHSRLSQCPEVHPLPTPVLLPAVDFSLGEWKTQMEETKAQDILGAVTLLLEGVMAARGQLGPTCLSSLLGQLSGQVRLLLGALQSLLGTQLPPQGRTTAHKDPNAIFLSFQHLLRGKVRQLNLVGGSTLCVRRAPPTTAVPSRTSLVLTLNELPNRTSGLLETNFTASARTTGSGLLKWQQGFRAKIPGLLNQTSRSLDQIPGYLNRIHELLNGTRGLFPGPSRRTLGAPDISSGTSDTGSLPPNLQPGYSPSPTHPPTGQYTLFPLPPTLPTPVVQLHPLLPDPSAPTPTPTSPLLNTSYTHSQNLSQEG

SEQ ID NO: 202 - protein, 332 aa, Artificial sequence
  Synthetic
SPAPPACDLRVLSKLLRDSHVLHSRLSQCPEVHPLPTPVLLPAVDFSLGEWKTQMEETKAQDILGAVTLLLEGVMAARGQLGPTCLSSLLGQLSGQVRLLLGALQSLLGTQLPPQGRTTAHKDPNAIFLSFQHLLRGKVRQLLLVGGSTLCVRRAPPTTAVPSRTSLVLTLNELPNRTSGLLETNFTASARTTGSGLLKWQQGFRAKIPGLLNQTSRSLDQIPGYLNRIHELLNGTRGLFPGPSRRTLGAPDISSGTSDTGSLPPNLQPGYSPSPTHPPTGQYTLFPLPPTLPTPVVQLHPLLPDPSAPTPTPTSPLLNTSYTHSQNLSQEG

SEQ ID NO: 203 - protein, 332 aa, Artificial sequence
  Synthetic
SPAPPACDLRVLSKLLRDSHVLHSRLSQCPEVHPLPTPVLLPAVDFSLGEWKTQMEETKAQDILGAVTLLLEGVMAARGQLGPTCLSSLLGQLSGQVRLLLGALQSLLGTQLPPQGRTTAHKDPNAIFLSFQHLLRDKVRDLMLVGGSTLCVRRAPPTTAVPSRTSLVLTLNELPNRTSGLLETNFTASARTTGSGLLKWQQGFRAKIPGLLNQTSRSLDQIPGYLNRIHELLNGTRGLFPGPSRRTLGAPDISSGTSDTGSLPPNLQPGYSPSPTHPPTGQYTLFPLPPTLPTPVVQLHPLLPDPSAPTPTPTSPLLNTSYTHSQNLSQEG

SEQ ID NO: 204 - protein, 332 aa, Artificial sequence
  Synthetic
SPAPPACDLRVLSKLLRDSHVLHSRLSQCPEVHPLPTPVLLPAVDFSLGEWKTQMEETKAQDILGAVTLLLEGVMAARGQLGPTCLSSLLGQLSGQVRLLLGALQSLLGTQLPPQGRTTAHKDPNAIFLSFQHLLRDKVRDLNLVGGSTLCVRRAPPTTAVPSRTSLVLTLNELPNRTSGLLETNFTASARTTGSGLLKWQQGFRAKIPGLLNQTSRSLDQIPGYLNRIHELLNGTRGLFPGPSRRTLGAPDISSGTSDTGSLPPNLQPGYSPSPTHPPTGQYTLFPLPPTLPTPVVQLHPLLPDPSAPTPTPTSPLLNTSYTHSQNLSQEG

SEQ ID NO: 205 - protein, 332 aa, Artificial sequence
  Synthetic
SPAPPACDLRVLSKLLRDSHVLHSRLSQCPEVHPLPTPVLLPAVDFSLGEWKTQMEETKAQDILGAVTLLLEGVMAARGQLGPTCLSSLLGQLSGQVRLLLGALQSLLGTQLPPQGRTTAHKDPNAIFLSFQHLLRDKVRDLLLVGGSTLCVRRAPPTTAVPSRTSLVLTLNELPNRTSGLLETNFTASARTTGSGLLKWQQGFRAKIPGLLNQTSRSLDQIPGYLNRIHELLNGTRGLFPGPSRRTLGAPDISSGTSDTGSLPPNLQPGYSPSPTHPPTGQYTLFPLPPTLPTPVVQLHPLLPDPSAPTPTPTSPLLNTSYTHSQNLSQEG

SEQ ID NO: 206 - protein, 332 aa, Artificial sequence
  Synthetic
SPAPPACDLRVLSKLLRDSHVLHSRLSQCPEVHPLPTPVLLPAVDFSLGEWKTQMEETKAQDILGAVTLLLEGVMAARGQLGPTCLSSLLGQLSGQVRLLLGALQSLLGTQLPPQGRTTAHKDPNAIFLSFQHLLRDKVRTLMLVGGSTLCVRRAPPTTAVPSRTSLVLTLNELPNRTSGLLETNFTASARTTGSGLLKWQQGFRAKIPGLLNQTSRSLDQIPGYLNRIHELLNGTRGLFPGPSRRTLGAPDISSGTSDTGSLPPNLQPGYSPSPTHPPTGQYTLFPLPPTLPTPVVQLHPLLPDPSAPTPTPTSPLLNTSYTHSQNLSQEG

SEQ ID NO: 207 - protein, 332 aa, Artificial sequence
  Synthetic
SPAPPACDLRVLSKLLRDSHVLHSRLSQCPEVHPLPTPVLLPAVDFSLGEWKTQMEETKAQDILGAVTLLLEGVMAARGQLGPTCLSSLLGQLSGQVRLLLGALQSLLGTQLPPQGRTTAHKDPNAIFLSFQHLLRDKVRTLNLVGGSTLCVRRAPPTTAVPSRTSLVLTLNELPNRTSGLLETNFTASARTTGSGLLKWQQGFRAKIPGLLNQTSRSLDQIPGYLNRIHELLNGTRGLFPGPSRRTLGAPDISSGTSDTGSLPPNLQPGYSPSPTHPPTGQYTLFPLPPTLPTPVVQLHPLLPDPSAPTPTPTSPLLNTSYTHSQNLSQEG

SEQ ID NO: 208 - protein, 332 aa, Artificial sequence
  Synthetic
SPAPPACDLRVLSKLLRDSHVLHSRLSQCPEVHPLPTPVLLPAVDFSLGEWKTQMEETKAQDILGAVTLLLEGVMAARGQLGPTCLSSLLGQLSGQVRLLLGALQSLLGTQLPPQGRTTAHKDPNAIFLSFQHLLRDKVRTLLLVGGSTLCVRRAPPTTAVPSRTSLVLTLNELPNRTSGLLETNFTASARTTGSGLLKWQQGFRAKIPGLLNQTSRSLDQIPGYLNRIHELLNGTRGLFPGPSRRTLGAPDISSGTSDTGSLPPNLQPGYSPSPTHPPTGQYTLFPLPPTLPTPVVQLHPLLPDPSAPTPTPTSPLLNTSYTHSQNLSQEG

SEQ ID NO: 209 - protein, 332 aa, Artificial sequence
  Synthetic
SPAPPACDLRVLSKLLRDSHVLHSRLSQCPEVHPLPTPVLLPAVDFSLGEWKTQMEETKAQDILGAVTLLLEGVMAARGQLGPTCLSSLLGQLSGQVRLLLGALQSLLGTQLPPQGRTTAHKDPNAIFLSFQHLLRDKVRQLMLVGGSTLCVRRAPPTTAVPSRTSLVLTLNELPNRTSGLLETNFTASARTTGSGLLKWQQGFRAKIPGLLNQTSRSLDQIPGYLNRIHELLNGTRGLFPGPSRRTLGAPDISSGTSDTGSLPPNLQPGYSPSPTHPPTGQYTLFPLPPTLPTPVVQLHPLLPDPSAPTPTPTSPLLNTSYTHSQNLSQEG

SEQ ID NO: 210 - protein, 332 aa, Artificial sequence
  Synthetic
SPAPPACDLRVLSKLLRDSHVLHSRLSQCPEVHPLPTPVLLPAVDFSLGEWKTQMEETKAQDILGAVTLLLEGVMAARGQLGPTCLSSLLGQLSGQVRLLLGALQSLLGTQLPPQGRTTAHKDPNAIFLSFQHLLRDKVRQLNLVGGSTLCVRRAPPTTAVPSRTSLVLTLNELPNRTSGLLETNFTASARTTGSGLLKWQQGFRAKIPGLLNQTSRSLDQIPGYLNRIHELLNGTRGLFPGPSRRTLGAPDISSGTSDTGSLPPNLQPGYSPSPTHPPTGQYTLFPLPPTLPTPVVQLHPLLPDPSAPTPTPTSPLLNTSYTHSQNLSQEG

SEQ ID NO: 211 - protein, 332 aa, Artificial sequence
  Synthetic
SPAPPACDLRVLSKLLRDSHVLHSRLSQCPEVHPLPTPVLLPAVDFSLGEWKTQMEETKAQDILGAVTLLLEGVMAARGQLGPTCLSSLLGQLSGQVRLLLGALQSLLGTQLPPQGRTTAHKDPNAIFLSFQHLLRDKVRQLLLVGGSTLCVRRAPPTTAVPSRTSLVLTLNELPNRTSGLLETNFTASARTTGSGLLKWQQGFRAKIPGLLNQTSRSLDQIPGYLNRIHELLNGTRGLFPGPSRRTLGAPDISSGTSDTGSLPPNLQPGYSPSPTHPPTGQYTLFPLPPTLPTPVVQLHPLLPDPSAPTPTPTSPLLNTSYTHSQNLSQEG

SEQ ID NO: 212 - protein, 332 aa, Artificial sequence
  Synthetic
SPAPPACDLRVLSKLLRDSHVLHSRLSQCPEVHPLPTPVLLPAVDFSLGEWKTQMEETKAQDILGAVTLLLEGVMAARGQLGPTCLSSLLGQLSGQVRLLLGALQSLLGTQLPPQGRTTAHKDPNAIFLSFQHLLKGKVRKLLLVGGSTLCVRRAPPTTAVPSRTSLVLTLNELPNRTSGLLETNFTASARTTGSGLLKWQQGFRAKIPGLLNQTSRSLDQIPGYLNRIHELLNGTRGLFPGPSRRTLGAPDISSGTSDTGSLPPNLQPGYSPSPTHPPTGQYTLFPLPPTLPTPVVQLHPLLPDPSAPTPTPTSPLLNTSYTHSQNLSQEG

SEQ ID NO: 213 - protein, 332 aa, Artificial sequence
  Synthetic
SPAPPACDLRVLSKLLRDSHVLHSRLSQCPEVHPLPTPVLLPAVDFSLGEWKTQMEETKAQDILGAVTLLLEGVMAARGQLGPTCLSSLLGQLSGQVRLLLGALQSLLGTQLPPQGRTTAHKDPNAIFLSFQHLLKGKVRQLLLVGGSTLCVRRAPPTTAVPSRTSLVLTLNELPNRTSGLLETNFTASARTTGSGLLKWQQGFRAKIPGLLNQTSRSLDQIPGYLNRIHELLNGTRGLFPGPSRRTLGAPDISSGTSDTGSLPPNLQPGYSPSPTHPPTGQYTLFPLPPTLPTPVVQLHPLLPDPSAPTPTPTSPLLNTSYTHSQNLSQEG

SEQ ID NO: 214 - protein, 332 aa, Artificial sequence
  Synthetic
SPAPPACDLRVLSKLLRDSHVLHSRLSQCPEVHPLPTPVLLPAVDFSLGEWKTQMEETKAQDILGAVTLLLEGVMAARGQLGPTCLSSLLGQLSGQVRLLLGALQSLLGTQLPPQGRTTAHKDPNAIFLSFQHLLKGKVRYLLLVGGSTLCVRRAPPTTAVPSRTSLVLTLNELPNRTSGLLETNFTASARTTGSGLLKWQQGFRAKIPGLLNQTSRSLDQIPGYLNRIHELLNGTRGLFPGPSRRTLGAPDISSGTSDTGSLPPNLQPGYSPSPTHPPTGQYTLFPLPPTLPTPVVQLHPLLPDPSAPTPTPTSPLLNTSYTHSQNLSQEG

SEQ ID NO: 215 - protein, 332 aa, Artificial sequence
  Synthetic
SPAPPACDLRVLSKLLRDSHVLHSRLSQCPEVHPLPTPVLLPAVDFSLGEWKTQMEETKAQDILGAVTLLLEGVMAARGQLGPTCLSSLLGQLSGQVRLLLGALQSLLGTQLPPQGRTTAHKDPNAIFLSFQHLLKGKVKQLLLVGGSTLCVRRAPPTTAVPSRTSLVLTLNELPNRTSGLLETNFTASARTTGSGLLKWQQGFRAKIPGLLNQTSRSLDQIPGYLNRIHELLNGTRGLFPGPSRRTLGAPDISSGTSDTGSLPPNLQPGYSPSPTHPPTGQYTLFPLPPTLPTPVVQLHPLLPDPSAPTPTPTSPLLNTSYTHSQNLSQEG

SEQ ID NO: 216 - protein, 332 aa, Artificial sequence
  Synthetic
SPAPPACDLRVLSKLLRDSHVLHSRLSQCPEVHPLPTPVLLPAVDFSLGEWKTQMEETKAQDILGAVTLLLEGVMAARGQLGPTCLSSLLGQLSGQVRLLLGALQSLLGTQLPPQGRTTAHKDPNAIFLSFQHLLKAKVRKLLLVGGSTLCVRRAPPTTAVPSRTSLVLTLNELPNRTSGLLETNFTASARTTGSGLLKWQQGFRAKIPGLLNQTSRSLDQIPGYLNRIHELLNGTRGLFPGPSRRTLGAPDISSGTSDTGSLPPNLQPGYSPSPTHPPTGQYTLFPLPPTLPTPVVQLHPLLPDPSAPTPTPTSPLLNTSYTHSQNLSQEG

SEQ ID NO: 217 - protein, 332 aa, Artificial sequence
  Synthetic
SPAPPACDLRVLSKLLRDSHVLHSRLSQCPEVHPLPTPVLLPAVDFSLGEWKTQMEETKAQDILGAVTLLLEGVMAARGQLGPTCLSSLLGQLSGQVRLLLGALQSLLGTQLPPQGRTTAHKDPNAIFLSFQHLLKAKVRQLLLVGGSTLCVRRAPPTTAVPSRTSLVLTLNELPNRTSGLLETNFTASARTTGSGLLKWQQGFRAKIPGLLNQTSRSLDQIPGYLNRIHELLNGTRGLFPGPSRRTLGAPDISSGTSDTGSLPPNLQPGYSPSPTHPPTGQYTLFPLPPTLPTPVVQLHPLLPDPSAPTPTPTSPLLNTSYTHSQNLSQEG

SEQ ID NO: 218 - protein, 332 aa, Artificial sequence
  Synthetic
SPAPPACDLRVLSKLLRDSHVLHSRLSQCPEVHPLPTPVLLPAVDFSLGEWKTQMEETKAQDILGAVTLLLEGVMAARGQLGPTCLSSLLGQLSGQVRLLLGALQSLLGTQLPPQGRTTAHKDPNAIFLSFQHLLKAKVRYLLLVGGSTLCVRRAPPTTAVPSRTSLVLTLNELPNRTSGLLETNFTASARTTGSGLLKWQQGFRAKIPGLLNQTSRSLDQIPGYLNRIHELLNGTRGLFPGPSRRTLGAPDISSGTSDTGSLPPNLQPGYSPSPTHPPTGQYTLFPLPPTLPTPVVQLHPLLPDPSAPTPTPTSPLLNTSYTHSQNLSQEG

SEQ ID NO: 219 - protein, 332 aa, Artificial sequence
  Synthetic
SPAPPACDLRVLSKLLRDSHVLHSRLSQCPEVHPLPTPVLLPAVDFSLGEWKTQMEETKAQDILGAVTLLLEGVMAARGQLGPTCLSSLLGQLSGQVRLLLGALQSLLGTQLPPQGRTTAHKDPNAIFLSFQHLLKAKVKQLLLVGGSTLCVRRAPPTTAVPSRTSLVLTLNELPNRTSGLLETNFTASARTTGSGLLKWQQGFRAKIPGLLNQTSRSLDQIPGYLNRIHELLNGTRGLFPGPSRRTLGAPDISSGTSDTGSLPPNLQPGYSPSPTHPPTGQYTLFPLPPTLPTPVVQLHPLLPDPSAPTPTPTSPLLNTSYTHSQNLSQEG

SEQ ID NO: 220 - protein, 332 aa, Artificial sequence
  Synthetic
SPAPPACDLRVLSKLLRDSHVLHSRLSQCPEVHPLPTPVLLPAVDFSLGEWKTQMEETKAQDILGAVTLLLEGVMAARGQLGPTCLSSLLGQLSGQVRLLLGALQSLLGTQLPPQGRTTAHKDPNAIFLSFQHLLKAKVKYLLLVGGSTLCVRRAPPTTAVPSRTSLVLTLNELPNRTSGLLETNFTASARTTGSGLLKWQQGFRAKIPGLLNQTSRSLDQIPGYLNRIHELLNGTRGLFPGPSRRTLGAPDISSGTSDTGSLPPNLQPGYSPSPTHPPTGQYTLFPLPPTLPTPVVQLHPLLPDPSAPTPTPTSPLLNTSYTHSQNLSQEG

SEQ ID NO: 221 - protein, 332 aa, Artificial sequence
  Synthetic
SPAPPACDLRVLSKLLRDSHVLHSRLSQCPEVHPLPTPVLLPAVDFSLGEWKTQMEETKAQDILGAVTLLLEGVMAARGQLGPTCLSSLLGQLSGQVRLLLGALQSLLGTQLPPQGRTTAHKDPNAIFESFEHLLKGKVRQLLEAGGSTLCVRRAPPTTAVPSRTSLVLTLNELPNRTSGLLETNFTASARTTGSGLLKWQQGFRAKIPGLLNQTSRSLDQIPGYLNRIHELLNGTRGLFPGPSRRTLGAPDISSGTSDTGSLPPNLQPGYSPSPTHPPTGQYTLFPLPPTLPTPVVQLHPLLPDPSAPTPTPTSPLLNTSYTHSQNLSQEG

SEQ ID NO: 222 - protein, 332 aa, Artificial sequence
  Synthetic
SPAPPACDLRVLSKLLRDSHVLHSRLSQCPEVHPLPTPVLLPAVDFSLGEWKTQMEETKAQDILGAVTLLLEGVMAARGQLGPTCLSSLLGQLSGQVRLLLGALQSLLGTQLPPQGRTTAHKDPNAIFESFEHLLKGKVRYLLEAGGSTLCVRRAPPTTAVPSRTSLVLTLNELPNRTSGLLETNFTASARTTGSGLLKWQQGFRAKIPGLLNQTSRSLDQIPGYLNRIHELLNGTRGLFPGPSRRTLGAPDISSGTSDTGSLPPNLQPGYSPSPTHPPTGQYTLFPLPPTLPTPVVQLHPLLPDPSAPTPTPTSPLLNTSYTHSQNLSQEG

SEQ ID NO: 223 - protein, 332 aa, Artificial sequence
  Synthetic
SPAPPACDLRVLSKLLRDSHVLHSRLSQCPEVHPLPTPVLLPAVDFSLGEWKTQMEETKAQDILGAVTLLLEGVMAARGQLGPTCLSSLLGQLSGQVRLLLGALQSLLGTQLPPQGRTTAHKDPNAIFESFEHLARGKVRYLMEAGGSTLCVRRAPPTTAVPSRTSLVLTLNELPNRTSGLLETNFTASARTTGSGLLKWQQGFRAKIPGLLNQTSRSLDQIPGYLNRIHELLNGTRGLFPGPSRRTLGAPDISSGTSDTGSLPPNLQPGYSPSPTHPPTGQYTLFPLPPTLPTPVVQLHPLLPDPSAPTPTPTSPLLNTSYTHSQNLSQEG

SEQ ID NO: 224 - protein, 332 aa, Artificial sequence
  Synthetic
SPAPPACDLRVLSKLLRDSHVLHSRLSQCPEVHPLPTPVLLPAVDFSLGEWKTQMEETKAQDILGAVTLLLEGVMAARGQLGPTCLSSLLGQLSGQVRLLLGALQSLLGTQLPPQGRTTAHKDPNAIFESFEHLARGKVKFLMEAGGSTLCVRRAPPTTAVPSRTSLVLTLNELPNRTSGLLETNFTASARTTGSGLLKWQQGFRAKIPGLLNQTSRSLDQIPGYLNRIHELLNGTRGLFPGPSRRTLGAPDISSGTSDTGSLPPNLQPGYSPSPTHPPTGQYTLFPLPPTLPTPVVQLHPLLPDPSAPTPTPTSPLLNTSYTHSQNLSQEG

SEQ ID NO: 225 - protein, 332 aa, Artificial sequence
  Synthetic
SPAPPACDKRVLSKLLKDSHVLHSRLSQCPEVHPLPTPVLLPAVDFSLGEWKTQMEETKAQDILGAVTLLLEGVMAARGQLGPTCLSSLLGQLSGQVRLLLGALQSLLGTQLPPQGRTTAHKDPNAIFLSFQHLLRGKVRFLMLVGGSTLCVRRAPPTTAVPSRTSLVLTLNELPNRTSGLLETNFTASARTTGSGLLKWQQGFRAKIPGLLNQTSRSLDQIPGYLNRIHELLNGTRGLFPGPSRRTLGAPDISSGTSDTGSLPPNLQPGYSPSPTHPPTGQYTLFPLPPTLPTPVVQLHPLLPDPSAPTPTPTSPLLNTSYTHSQNLSQEG

SEQ ID NO: 226 - protein, 332 aa, Artificial sequence
  Synthetic
SPAPPACDKRVLSKLLQDSHVLHSRLSQCPEVHPLPTPVLLPAVDFSLGEWKTQMEETKAQDILGAVTLLLEGVMAARGQLGPTCLSSLLGQLSGQVRLLLGALQSLLGTQLPPQGRTTAHKDPNAIFLSFQHLLRGKVRFLMLVGGSTLCVRRAPPTTAVPSRTSLVLTLNELPNRTSGLLETNFTASARTTGSGLLKWQQGFRAKIPGLLNQTSRSLDQIPGYLNRIHELLNGTRGLFPGPSRRTLGAPDISSGTSDTGSLPPNLQPGYSPSPTHPPTGQYTLFPLPPTLPTPVVQLHPLLPDPSAPTPTPTSPLLNTSYTHSQNLSQEG

SEQ ID NO: 227 - protein, 332 aa, Artificial sequence
  Synthetic
SPAPPACDLRVLSKLLRDSHVLHSRLSQCPEVHPLPTPVLLPAVDFSLGEWKTQMEETKAQDILGAVTLLLEGVMAARGQLGPTCLSSLLGQLSGQVRLLLGALQSLLGTQLPPQGRTTAHKDPNAIFLSFQHLLKGKLRYLLLVGGSTLCVRRAPPTTAVPSRTSLVLTLNELPNRTSGLLETNFTASARTTGSGLLKWQQGFRAKIPGLLNQTSRSLDQIPGYLNRIHELLNGTRGLFPGPSRRTLGAPDISSGTSDTGSLPPNLQPGYSPSPTHPPTGQYTLFPLPPTLPTPVVQLHPLLPDPSAPTPTPTSPLLNTSYTHSQNLSQEG

SEQ ID NO: 228 - protein, 332 aa, Artificial sequence
  Synthetic
SPAPPACDLRVLSKLLRDSHVLHSRLSQCPEVHPLPTPVLLPAVDFSLGEWKTQMEETKAQDILGAVTLLLEGVMAARGQLGPTCLSSLLGQLSGQVRLLLGALQSLLGTQLPPQGRTTAHKDPNAIFLSFQHLLKGKLRQLLLVGGSTLCVRRAPPTTAVPSRTSLVLTLNELPNRTSGLLETNFTASARTTGSGLLKWQQGFRAKIPGLLNQTSRSLDQIPGYLNRIHELLNGTRGLFPGPSRRTLGAPDISSGTSDTGSLPPNLQPGYSPSPTHPPTGQYTLFPLPPTLPTPVVQLHPLLPDPSAPTPTPTSPLLNTSYTHSQNLSQEG

SEQ ID NO: 229 - protein, 332 aa, Artificial sequence
  Synthetic
SPAPPACDLRVLSKLLRDSHVLHSRLSQCPEVHPLPTPVLLPAVDFSLGEWKTQMEETKAQDILGAVTLLLEGVMAARGQLGPTCLSSLLGQLSGQVRLLLGALQSLLGTQLPPQGRTTAHKDPNAIFESFEHLLRGKVRFLMLVGGSTLCVRRAPPTTAVPSRTSLVLTLNELPNRTSGLLETNFTASARTTGSGLLKWQQGFRAKIPGLLNQTSRSLDQIPGYLNRIHELLNGTRGLFPGPSRRTLGAPDISSGTSDTGSLPPNLQPGYSPSPTHPPTGQYTLFPLPPTLPTPVVQLHPLLPDPSAPTPTPTSPLLNTSYTHSQNLSQEG

SEQ ID NO: 230 - protein, 332 aa, Artificial sequence
  Synthetic
SPAPPACDLRVLSKLLRDSHVLHSRLSQCPEVHPLPTPVLLPAVDFSLGEWKTQMEETKAQDILGAVTLLLEGVMAARGQLGPTCLSSLLGQLSGQVRLLLGALQSLLGTQLPPQGRTTAHKDPNAIFLSFQHLLRGKVRFLMEAGGSTLCVRRAPPTTAVPSRTSLVLTLNELPNRTSGLLETNFTASARTTGSGLLKWQQGFRAKIPGLLNQTSRSLDQIPGYLNRIHELLNGTRGLFPGPSRRTLGAPDISSGTSDTGSLPPNLQPGYSPSPTHPPTGQYTLFPLPPTLPTPVVQLHPLLPDPSAPTPTPTSPLLNTSYTHSQNLSQEG

SEQ ID NO: 231 - protein, 332 aa, Artificial sequence
  Synthetic
SPAPPACDLRVLSKLLRDSHVLHSRLSQCPEVHPLPTPVLLPAVDFSLGEWKTQMEETKAQDILGAVTLLLEGLMAARGQLGPTCLSSLLGQLSGQVRLLLGALQSLLGTQLPPQGRTTAHKDPNAIFLSFQHLLRGKVRFLMLVGGSTLCVRRAPPTTAVPSRTSLVLTLNELPNRTSGLLETNFTASARTTGSGLLKWQQGFRAKIPGLLNQTSRSLDQIPGYLNRIHELLNGTRGLFPGPSRRTLGAPDISSGTSDTGSLPPNLQPGYSPSPTHPPTGQYTLFPLPPTLPTPVVQLHPLLPDPSAPTPTPTSPLLNTSYTHSQNLSQEG

SEQ ID NO: 232 - protein, 332 aa, Artificial sequence
  Synthetic
SPAPPACDLRVLSKLLRDSHVLHSRLSQCPEVHPLPTPVLLPAVDFSLGEWKTQMEETKAQDILGAVTLLLEGVKAARGQLGPTCLSSLLGQLSGQVRLLLGALQSLLGTQLPPQGRTTAHKDPNAIFLSFQHLLRGKVRFLMLVGGSTLCVRRAPPTTAVPSRTSLVLTLNELPNRTSGLLETNFTASARTTGSGLLKWQQGFRAKIPGLLNQTSRSLDQIPGYLNRIHELLNGTRGLFPGPSRRTLGAPDISSGTSDTGSLPPNLQPGYSPSPTHPPTGQYTLFPLPPTLPTPVVQLHPLLPDPSAPTPTPTSPLLNTSYTHSQNLSQEG

SEQ ID NO: 233 - protein, 332 aa, Artificial sequence
  Synthetic
SPAPPACDLRVLSKLLRDSHVLHSRLSQCPEVHPLPTPVLLPAVDFSLGEWKTQMEETKAQDILGAVTLLLEGVQAARGQLGPTCLSSLLGQLSGQVRLLLGALQSLLGTQLPPQGRTTAHKDPNAIFLSFQHLLRGKVRFLMLVGGSTLCVRRAPPTTAVPSRTSLVLTLNELPNRTSGLLETNFTASARTTGSGLLKWQQGFRAKIPGLLNQTSRSLDQIPGYLNRIHELLNGTRGLFPGPSRRTLGAPDISSGTSDTGSLPPNLQPGYSPSPTHPPTGQYTLFPLPPTLPTPVVQLHPLLPDPSAPTPTPTSPLLNTSYTHSQNLSQEG

SEQ ID NO: 234 - protein, 332 aa, Artificial sequence
  Synthetic
SPAPPACDLRVLSKLLRDSHVLHSRLSQCPEVHPLPTPVLLPAVDFSLGEWKTQMEETKAQDILGAVTLLLEGAMAARGQLGPTCLSSLLGQLSGQVRLLLGALQSLLGTQLPPQGRTTAHKDPNAIFLSFQHLLRGKVRFLMLVGGSTLCVRRAPPTTAVPSRTSLVLTLNELPNRTSGLLETNFTASARTTGSGLLKWQQGFRAKIPGLLNQTSRSLDQIPGYLNRIHELLNGTRGLFPGPSRRTLGAPDISSGTSDTGSLPPNLQPGYSPSPTHPPTGQYTLFPLPPTLPTPVVQLHPLLPDPSAPTPTPTSPLLNTSYTHSQNLSQEG

SEQ ID NO: 235 - protein, 332 aa, Artificial sequence
  Synthetic
SPAPPACDLRVLSKLLRDSHVLHSRLSQCPEVHPLPTPVLLPAVDFSLGEWKTQMEETKAQDILGAVTLLLEGVMAARGQLGPTCLSSLLGQLSGQTRLLLGSLQSLLGTQLPPQGRTTAHKDPNAIFLSFQHLLRGKVRFLMLVGGSTLCVRRAPPTTAVPSRTSLVLTLNELPNRTSGLLETNFTASARTTGSGLLKWQQGFRAKIPGLLNQTSRSLDQIPGYLNRIHELLNGTRGLFPGPSRRTLGAPDISSGTSDTGSLPPNLQPGYSPSPTHPPTGQYTLFPLPPTLPTPVVQLHPLLPDPSAPTPTPTSPLLNTSYTHSQNLSQEG

SEQ ID NO: 236 - protein, 332 aa, Artificial sequence
  Synthetic
SPAPPACDLRVLSKLLRDSHVLHSRLSQCPEVHPLPTPVLLPAVDFSLGEWKTQMEETKAQDILGAVTLLLEGVMAARGQLGPTCLSSLLGQLSGQVKLILGALQSLLGTQLPPQGRTTAHKDPNAIFLSFQHLLRGKVRFLMLVGGSTLCVRRAPPTTAVPSRTSLVLTLNELPNRTSGLLETNFTASARTTGSGLLKWQQGFRAKIPGLLNQTSRSLDQIPGYLNRIHELLNGTRGLFPGPSRRTLGAPDISSGTSDTGSLPPNLQPGYSPSPTHPPTGQYTLFPLPPTLPTPVVQLHPLLPDPSAPTPTPTSPLLNTSYTHSQNLSQEG

SEQ ID NO: 237 - protein, 332 aa, Artificial sequence
  Synthetic
SPAPPACDLRVLSKLLRDSHVLHSRLSQCPEVHPLPTPVLLPAVDFSLGEWKTQMEETKAQDILGAVTLLLEGVMAARGQLGPTCLSSLLGQLSGQVQVLLGALQSLLGTQLPPQGRTTAHKDPNAIFLSFQHLLRGKVRFLMLVGGSTLCVRRAPPTTAVPSRTSLVLTLNELPNRTSGLLETNFTASARTTGSGLLKWQQGFRAKIPGLLNQTSRSLDQIPGYLNRIHELLNGTRGLFPGPSRRTLGAPDISSGTSDTGSLPPNLQPGYSPSPTHPPTGQYTLFPLPPTLPTPVVQLHPLLPDPSAPTPTPTSPLLNTSYTHSQNLSQEG

1. A non-naturally occurring thrombopoietin (TPO) molecule comprising at least one peptide having reduced binding to at least 1 human MHC Class II allele.

2. A non-naturally occurring TPO molecule according to claim 1, wherein said molecule comprises residues 1-153.

3. A non-naturally occurring TPO molecule according to claim 1, wherein said molecule has at least one amino acid substitution as compared to wild type TPO.

4. A non-naturally occurring TPO molecule of claim 3 wherein said amino acid substitutions are incorporated at one or more of the following positions: 9-24, 69-77, 97-105,128-160, or 296-305.

5. A non-naturally occurring TPO molecule according to claim 4, wherein said amino acid substitutions are incorporated at one or more of the following positions: 9-17.

6. A non-naturally occurring TPO molecule according to claim 4, wherein said amino acid substitutions are incorporated at one or more of the following positions: 129-145.

7. A non-naturally occurring TPO molecule according to claim 4, wherein said amino acid substitutions are incorporated at one or more of the following positions: 69-77.

8. A non-naturally occurring TPO molecule according to claim 4, wherein said amino acid substitutions are selected from amino acid residues at positions 97-105.

9. A non-naturally occurring TPO molecule according to claim 5, wherein said amino acid substitutions are selected from the group consisting of L9E, L9K, L9R, L9S, R10D, R10E, R10S, R10T, K14D, K14E, and K14R.

10. A non-naturally occurring TPO molecule according to claim 9, wherein said amino acid substitutions are selected from the group consisting of L9S, L9K, L9R, L9E, (R10E and K14D), (R10E and K14E), (R10T and K14D).

11. A non-naturally occurring TPO molecule according to claim 5, wherein said amino acid substitutions are selected from the group consisting of: L9A, V11A, V11I, K14R, L15A, L15V, R17K, R17Q, R17S, R17E.

12. A non-naturally occurring TPO molecule according to claim 11, wherein said amino acid substitutions are selected from the group consisting of: (L9A, V11I, K14R, and R17E) or (L9A and R17E).

13. A non-naturally occurring TPO molecule of claim 5 selected from the group consisting of SEQ ID NO.: ______.

14. A non-naturally occurring TPO molecule according to claim 6, wherein said amino acid substitutions are selected from the group consisting of: R136D, R136E, R136K, R136Q, K138N, K138Q, K138R, K138S, K138T, R140D, and R140E.

15. A non-naturally occurring TPO molecule according to claim 14, wherein said amino acid substitution is selected from the group consisting of: R136D, R136E, R136K, R136Q, (K138T and R140E), and (K138N and R140E).

16. A non-naturally occurring TPO molecule according to claim 6, wherein said amino acid substitutions are selected from the group consisting of: L129E, Q132E, L135A, R136K, V139L, R140K, F141Y, F141Q, M143L, L144E, V145A.

17. A non-naturally occurring TPO molecule according to claim 16, wherein said amino acid substitutions are selected from the group consisting of: (L129E, Q132E, R136K, F141Y, M143L, L144E, and V145A) or (L129E, Q132E, L135A, F141Y, L144E, and V145A).

18. A non-naturally occurring TPO molecule according to claim 6 selected from the group consisting of SEQ ID NO.: ______.

19. A non-naturally occurring TPO molecule according to claim 7, wherein said amino acid substitutions are selected from the group consisting of L69A, L69Q, E72K, V74L, M75K, M75L, and M75Q.

20. A non-naturally occurring TPO molecule according to claim 19, wherein said amino acid substitutions are selected from the group consisting of (L69A and M75L), (L69A and M75Q), L69A, (L69Q and M75K), (L69Q, E72K, and M75L), (L69Q, E72K, and M75K), and (L69Q and V74L).

21. A non-naturally occurring TPO molecule according to claim 8, herein said amino acid substitutions are selected from the group consisting of V97T, R98K, R98Q, L99I, L99V, L100I, A103S, and Q105E.

22. A non-naturally occurring TPO molecule according to claim 21, wherein said amino acid substitutions are selected from the group consisting of: (R98K, L99V, and Q105E) and (R98K, L99V, A103S, and Q105E).

23. A non-naturally occurring TPO molecule comprising modifications in at least 2 of the following groups of residues: 9-17, 129-145, 69-77, and 97-105.

24. A non-naturally occurring TPO molecule of claim 1 having at least a 5% reduction in the fraction of patients in which neutralizing antibodies are elicited.

25. A recombinant nucleic acid encoding the non-naturally occurring TPO molecule of claim 1.

26. An expression vector comprising the recombinant nucleic acid of claim 25.

27. A host cell comprising the recombinant nucleic acid of claim 25.

28. A method of producing a non-naturally occurring TPO molecule comprising culturing the host cell of claim 27 under conditions suitable for expression of said nucleic acid.

29. A pharmaceutical composition comprising a non-naturally occurring TPO molecule according to claim 1 and a pharmaceutical carrier.

30. A method for treating a TPO-related disorder comprising administering a non-naturally occurring TPO molecule according to claim 1 to a patient.
